(19) United States
(12) Patent Application Publication
(10) Pub. No.: US 2023/0203134 A1
(43) Pub. Date: Jun. 29, 2023

(54) POTENT NEUTRALIZING ANTIBODIES AGAINST SARS-COV-2, GENERATION AND USES THEREOF

(71) Applicant: The Trustees of Columbia University in the City of New York, New York, NY (US)

(72) Inventors: David D. HO, Bedford, NY (US); Yaoxing HUANG, Brooklyn, NY (US); Lihong LIU, Shanghai (CN); Manoj S. NAIR, Fair Lawn, NJ (US); Pengfei WANG, Elmhurst, NY (US); Jian YU, New Providence, NJ (US); Yang LUO, New York, NY (US)

(21) Appl. No.: 17/999,387

(22) PCT Filed: May 20, 2021
(86) PCT No.: PCT/US2021/033512

§ 371 Date: Nov. 18, 2022

Related U.S. Application Data
(60) Provisional application No. 63/165,729, filed on Mar. 24, 2021.
(60) Provisional application No. 63/123,767, filed on Dec. 10, 2020.
(60) Provisional application No. 63/117,908, filed on Nov. 24, 2020.
(60) Provisional application No. 63/063,106, filed on Aug. 7, 2020.
(60) Provisional application No. 63/060,116, filed on Aug. 2, 2020.
(60) Provisional application No. 63/039,977, filed on Jun. 16, 2020.
(60) Provisional application No. 63/032,518, filed on May 29, 2020.
(60) Provisional application No. 63/027,935, filed on May 20, 2020.

(51) Int. Cl. C07K 16/10; A61P 31/14

(52) U.S. Cl. CPC C07K 16/10; A61P 31/14; A61K 2039/505

(57) ABSTRACT

The subject matter described herein relates to potent monoclonal and bispecific antibodies capable of neutralizing a SARS-CoV-2 viruses and methods of generating the antibodies.

[0001] This application claims the benefit of and priority to U.S. Provisional Patent Application No. 63/027,935, filed on May 20, 2020, U.S. Provisional Patent Application No. 63/032,518, filed on May 29, 2020, U.S. Provisional Patent Application No. 63/039,977, filed on Jun. 16, 2020, U.S. Provisional Patent Application No. 63/063,106, filed Aug. 7, 2020, U.S. Provisional Patent Application No. 63/123,767, filed Dec. 10, 2020, U.S. Provisional Patent Application No. 63/060,116, filed on Aug. 2, 2020, U.S. Provisional Patent Application No. 63/117,908, filed on Nov. 24, 2020, and U.S. Provisional Patent Application No. 63/165,729, filed on Mar. 24, 2021, the contents of each of which is hereby incorporated by reference in its entirety.

[0002] All patents, patent applications and publications cited herein are hereby incorporated by reference in their entirety. The disclosures of these publications in their entireties are hereby incorporated by reference into this application.

[0003] This patent disclosure contains material that is subject to copyright protection. The copyright owner has no objection to the facsimile reproduction by anyone of the patent document or the patent disclosure as it appears in the U.S. Patent and Trademark Office patent file or records, but otherwise reserves any and all copyright rights.

### BACKGROUND OF THE INVENTION

[0004] Coronavirus disease 2019 (COVID-19) is an infectious disease caused by the severe acute respiratory syndrome coronavirus 2 (SARS-CoV-2). The disease affects multiple organs in the body including the lungs. There is an urgent need for the development of therapeutics to combat COVID-19.

### SUMMARY OF THE INVENTION

[0005] In certain aspects, the invention provides a bispecific molecule comprising a first polypeptide chain and a second polypeptide chain, wherein: the first polypeptide chain comprises: a first light chain comprising a variable domain and a constant domain; a first heavy chain comprising a variable domain and a constant domain; the second polypeptide chain comprises: a second light chain comprising a variable domain and a constant domain; and a second heavy chain comprising a variable domain and a constant domain.

[0006] In some embodiments, the first polypeptide chain and the second polypeptide chain are covalently bonded to one another. In some embodiments, the first heavy chain comprises a polypeptide sequence which is at least 60%, 62%, 65%, 67%, 70%, 72%, 75%, 77%, 80%, 82%, 85%, 87%, 90%, 92%, 95%, 97%, 98%, 99% identical to SEQ ID NO: 59 or a polypeptide sequence which is at least 60%, 62%, 65%, 67%, 70%, 72%, 75%, 77%, 80%, 82%, 85%, 87%, 90%, 92%, 95%, 97%, 98%, 99% identical to SEQ ID NO: 63. In some embodiments, the first light chain comprises a polypeptide sequence which is at least 60%, 62%, 65%, 67%, 70%, 72%, 75%, 77%, 80%, 82%, 85%, 87%, 90%, 92%, 95%, 97%, 98%, 99% identical to SEQ ID NO: 60 or a polypeptide sequence which is at least 60%, 62%, 65%, 67%, 70%, 72%, 75%, 77%, 80%, 82%, 85%, 87%, 90%, 92%, 95%, 97%, 98%, 99% identical to SEQ ID NO: 64. In some embodiments, the second heavy chain comprises a polypeptide sequence which is at least 60%, 62%, 65%, 67%, 70%, 72%, 75%, 77%, 80%, 82%, 85%, 87%, 90%, 92%, 95%, 97%, 98%, 99% identical to SEQ ID NO: 61 or a polypeptide sequence which is at least 60%, 62%, 65%, 67%, 70%, 72%, 75%, 77%, 80%, 82%, 85%, 87%, 90%, 92%, 95%, 97%, 98%, 99% identical to SEQ ID NO: 65. In some embodiments, the second light chain comprises a polypeptide sequence which is at least 60%, 62%, 65%, 67%, 70%, 72%, 75%, 77%, 80%, 82%, 85%, 87%, 90%, 92%, 95%, 97%, 98%, 99% identical to SEQ ID NO: 62 or a polypeptide sequence which is at least 60%, 62%, 65%, 67%, 70%, 72%, 75%, 77%, 80%, 82%, 85%, 87%, 90%, 92%, 95%, 97%, 98%, 99% identical to SEQ ID NO: 66.

[0007] In some embodiments, the first heavy chain comprises SEQ ID NO: 59 or SEQ ID NO: 63. In some embodiments, the first light chain comprises SEQ ID NO: 60 or SEQ ID NO: 64. In some embodiments, the second heavy chain comprises SEQ ID NO: 61 or SEQ ID NO: 65. In some embodiments, the second light chain comprises SEQ ID NO: 62 or SEQ ID NO: 66.

[0008] In some embodiments, the variable domain of the first heavy chain comprises CDR1, CDR2, and CDR3 of SEQ ID NO: 59 or CDR1, CDR2, and CDR3 of SEQ ID NO: 63. In some embodiments, the variable domain of the first light chain comprises CDR1, CDR2, and CDR3 of SEQ ID NO: 60 or CDR1, CDR2, and CDR3 of SEQ ID NO: 64. In some embodiments, the variable domain of the second heavy chain comprises CDR1, CDR2, and CDR3 of SEQ ID NO: 61 or CDR1, CDR2, and CDR3 of SEQ ID NO: 65. In some embodiments, the variable domain of the second light chain comprises CDR1, CDR2, and CDR3 SEQ ID NO: 62 or CDR1, CDR2, and CDR3 of SEQ ID NO: 66.

[0009] In some embodiments, the variable domain of the first heavy chain comprises a polypeptide sequence which is at least 60%, 62%, 65%, 67%, 70%, 72%, 75%, 77%, 80%, 82%, 85%, 87%, 90%, 92%, 95%, 97%, 98%, 99% identical to SEQ ID NO: 13 or a polypeptide sequence which is at least 60%, 62%, 65%, 67%, 70%, 72%, 75%, 77%, 80%, 82%, 85%, 87%, 90%, 92%, 95%, 97%, 98%, 99% identical to SEQ ID NO: 27. In some embodiments, the variable domain of the first light chain comprises a polypeptide sequence which is at least 60%, 62%, 65%, 67%, 70%, 72%, 75%, 77%, 80%, 82%, 85%, 87%, 90%, 92%, 95%, 97%, 98%, 99% identical to SEQ ID NO: 14 or a polypeptide sequence which is at least 60%, 62%, 65%, 67%, 70%, 72%, 75%, 77%, 80%, 82%, 85%, 87%, 90%, 92%, 95%, 97%, 98%, 99% identical to SEQ ID NO: 28. In some embodiments, the variable domain of the second heavy chain comprises a polypeptide sequence which is at least 60%, 62%, 65%, 67%, 70%, 72%, 75%, 77%, 80%, 82%, 85%, 87%, 90%, 92%, 95%, 97%, 98%, 99% identical to SEQ ID NO: 27 or a polypeptide sequence which is at least 60%, 62%, 65%, 67%, 70%, 72%, 75%, 77%, 80%, 82%, 85%, 87%, 90%, 92%, 95%, 97%, 98%, 99% identical to SEQ ID NO: 13. In some embodiments, the variable domain of the second light chain comprises a polypeptide sequence which is at least 60%, 62%, 65%, 67%, 70%, 72%, 75%, 77%, 80%, 82%, 85%, 87%, 90%, 92%, 95%, 97%, 98%, 99% identical to SEQ ID NO: 28 or a polypeptide sequence which is at least 60%, 62%, 65%, 67%, 70%, 72%, 75%, 77%, 80%, 82%, 85%, 87%, 90%, 92%, 95%, 97%, 98%, 99% identical to SEQ ID NO: 14.

[0010] In some embodiments, the variable domain of the first heavy chain comprises SEQ ID NO: 13 or SEQ ID NO: 27. In some embodiments, the variable domain of the first light chain comprises SEQ ID NO: 14 or SEQ ID NO: 28. In some embodiments, the variable domain of the second heavy chain comprises SEQ ID NO: 27 or SEQ ID NO: 13. In some embodiments, the variable domain of the second light chain comprises SEQ ID NO: 28 or SEQ ID NO: 14.

[0011] In some embodiments, the molecule comprises a polypeptide sequence which is at least 60%, 62%, 65%, 67%, 70%, 72%, 75%, 77%, 80%, 82%, 85%, 87%, 90%, 92%, 95%, 97%, 98%, 99% identical to SEQ ID NOs: 59, a polypeptide sequence which is at least 60%, 62%, 65%, 67%, 70%, 72%, 75%, 77%, 80%, 82%, 85%, 87%, 90%, 92%, 95%, 97%, 98%, 99% identical to SEQ ID NO: 60, a polypeptide sequence which is at least 60%, 62%, 65%, 67%, 70%, 72%, 75%, 77%, 80%, 82%, 85%, 87%, 90%, 92%, 95%, 97%, 98%, 99% identical to SEQ ID NO: 61, and a polypeptide sequence which is at least 60%, 62%, 65%, 67%, 70%, 72%, 75%, 77%, 80%, 82%, 85%, 87%, 90%, 92%, 95%, 97%, 98%, 99% identical to SEQ ID NO: 62. In some embodiments, the molecule comprises a polypeptide sequence which is at least 60%, 62%, 65%, 67%, 70%, 72%, 75%, 77%, 80%, 82%, 85%, 87%, 90%, 92%, 95%, 97%, 98%, 99% identical to SEQ ID NOs: 63, a polypeptide sequence which is at least 60%, 62%, 65%, 67%, 70%, 72%, 75%, 77%, 80%, 82%, 85%, 87%, 90%, 92%, 95%, 97%, 98%, 99% identical to SEQ ID NO: 64, a polypeptide sequence which is at least 60%, 62%, 65%, 67%, 70%, 72%, 75%, 77%, 80%, 82%, 85%, 87%, 90%, 92%, 95%, 97%, 98%, 99% identical to SEQ ID NO: 65, and a polypeptide sequence which is at least 60%, 62%, 65%, 67%, 70%, 72%, 75%, 77%, 80%, 82%, 85%, 87%, 90%, 92%, 95%, 97%, 98%, 99% identical to SEQ ID NO: 66. In some embodiments, the molecule comprises a polypeptide sequence which is at least 60%, 62%, 65%, 67%, 70%, 72%, 75%, 77%, 80%, 82%, 85%, 87%, 90%, 92%, 95%, 97%, 98%, 99% identical to SEQ ID NOs: 13, a polypeptide sequence which is at least 60%, 62%, 65%, 67%, 70%, 72%, 75%, 77%, 80%, 82%, 85%, 87%, 90%, 92%, 95%, 97%, 98%, 99% identical to SEQ ID NO: 14, a polypeptide sequence which is at least 60%, 62%, 65%, 67%, 70%, 72%, 75%, 77%, 80%, 82%, 85%, 87%, 90%, 92%, 95%, 97%, 98%, 99% identical to SEQ ID NO: 27, and a polypeptide sequence which is at least 60%, 62%, 65%, 67%, 70%, 72%, 75%, 77%, 80%, 82%, 85%, 87%, 90%, 92%, 95%, 97%, 98%, 99% identical to SEQ ID NO: 28.

[0012] In some embodiments, the molecule comprises SEQ ID NOs: 59, 60, 61, and 62. In some embodiments, the molecule comprises SEQ ID NOs: 63, 64, 65, and 66. In some embodiments, the molecule comprises SEQ ID NOs: 13, 14, 27, and 28.

[0013] In some embodiments, the molecule further comprises one or more disulfide bonds. In some embodiments, the molecule further comprises one or more linker sequences. In some embodiments, the molecule is capable of neutralizing a coronavirus. In some embodiments, the coronavirus is a SARS-CoV-2 virus strain. In some embodiments, the molecule specifically recognizes a first epitope and a second epitope on a SARS-CoV-2 particle. In some embodiments, the first epitope comprises at least a portion of a receptor binding domain (RBD) on an S protein of a SARS-CoV-2 particle. In some embodiments, the second epitope comprises at least a portion of a N-terminal domain (NTD) on an S protein of a SARS-CoV-2 particle.

[0014] In certain aspects, the invention provides a method of treating a COVID-19 infection in a subject in need thereof, the method comprising administering to the subject a composition comprising a bispecific molecule, wherein the bispecific molecule comprises a first polypeptide chain and a second polypeptide chain, wherein: the first polypeptide chain comprises: a first light chain comprising a variable domain and a constant domain; a first heavy chain comprising a variable domain and a constant domain; the second polypeptide chain comprises: a second light chain comprising a variable domain and a constant domain; and a second heavy chain comprising a variable domain and a constant domain.

[0015] In some embodiments, the first polypeptide chain and the second polypeptide chain are covalently bonded to one another. In some embodiments, the first heavy chain comprises a polypeptide sequence which is at least 60%, 62%, 65%, 67%, 70%, 72%, 75%, 77%, 80%, 82%, 85%, 87%, 90%, 92%, 95%, 97%, 98%, 99% identical to SEQ ID NO: 59 or a polypeptide sequence which is at least 60%, 62%, 65%, 67%, 70%, 72%, 75%, 77%, 80%, 82%, 85%, 87%, 90%, 92%, 95%, 97%, 98%, 99% identical to SEQ ID NO: 63. In some embodiments, the first light chain comprises a polypeptide sequence which is at least 60%, 62%, 65%, 67%, 70%, 72%, 75%, 77%, 80%, 82%, 85%, 87%, 90%, 92%, 95%, 97%, 98%, 99% identical to SEQ ID NO: 60 or a polypeptide sequence which is at least 60%, 62%, 65%, 67%, 70%, 72%, 75%, 77%, 80%, 82%, 85%, 87%, 90%, 92%, 95%, 97%, 98%, 99% identical to SEQ ID NO: 64. In some embodiments, the second heavy chain comprises a polypeptide sequence which is at least 60%, 62%, 65%, 67%, 70%, 72%, 75%, 77%, 80%, 82%, 85%, 87%, 90%, 92%, 95%, 97%, 98%, 99% identical to SEQ ID NO: 61 or a polypeptide sequence which is at least 60%, 62%, 65%, 67%, 70%, 72%, 75%, 77%, 80%, 82%, 85%, 87%, 90%, 92%, 95%, 97%, 98%, 99% identical to SEQ ID NO: 65. In some embodiments, the second light chain comprises a polypeptide sequence which is at least 60%, 62%, 65%, 67%, 70%, 72%, 75%, 77%, 80%, 82%, 85%, 87%, 90%, 92%, 95%, 97%, 98%, 99% identical to SEQ ID NO: 62 or a polypeptide sequence which is at least 60%, 62%, 65%, 67%, 70%, 72%, 75%, 77%, 80%, 82%, 85%, 87%, 90%, 92%, 95%, 97%, 98%, 99% identical to SEQ ID NO: 66.

[0016] In some embodiments, the first heavy chain comprises SEQ ID NO: 59 or SEQ ID NO: 63. In some embodiments, the first light chain comprises SEQ ID NO: 60 or SEQ ID NO: 64. In some embodiments, the second heavy chain comprises SEQ ID NO: 61 or SEQ ID NO: 65. In some embodiments, the second light chain comprises SEQ ID NO: 62 or SEQ ID NO: 66. In some embodiments, the variable domain of the first heavy chain comprises CDR1, CDR2, and CDR3 of SEQ ID NO: 59 or CDR1, CDR2, and CDR3 of SEQ ID NO: 63. In some embodiments, the variable domain of the first light chain comprises CDR1, CDR2, and CDR3 of SEQ ID NO: 60 or CDR1, CDR2, and CDR3 of SEQ ID NO: 64. In some embodiments, the variable domain of the second heavy chain comprises CDR1, CDR2, and CDR3 of SEQ ID NO: 61 or CDR1, CDR2, and CDR3 of SEQ ID NO: 65. In some embodiments, the variable domain of the second light chain comprises CDR1, CDR2, and CDR3 SEQ ID NO: 62 or CDR1, CDR2, and CDR3 of SEQ ID NO: 66.

[0017] In some embodiments, the variable domain of the first heavy chain comprises a polypeptide sequence which is at least 60%, 62%, 65%, 67%, 70%, 72%, 75%, 77%, 80%, 82%, 85%, 87%, 90%, 92%, 95%, 97%, 98%, 99% identical to SEQ ID NO: 13 or a polypeptide sequence which is at least 60%, 62%, 65%, 67%, 70%, 72%, 75%, 77%, 80%, 82%, 85%, 87%, 90%, 92%, 95%, 97%, 98%, 99% identical to SEQ ID NO: 27. In some embodiments, the variable domain of the first light chain comprises a polypeptide sequence which is at least 60%, 62%, 65%, 67%, 70%, 72%, 75%, 77%, 80%, 82%, 85%, 87%, 90%, 92%, 95%, 97%, 98%, 99% identical to SEQ ID NO: 14 or a polypeptide sequence which is at least 60%, 62%, 65%, 67%, 70%, 72%, 75%, 77%, 80%, 82%, 85%, 87%, 90%, 92%, 95%, 97%, 98%, 99% identical to SEQ ID NO: 28. In some embodiments, the variable domain of the second heavy chain comprises a polypeptide sequence which is at least 60%, 62%, 65%, 67%, 70%, 72%, 75%, 77%, 80%, 82%, 85%, 87%, 90%, 92%, 95%, 97%, 98%, 99% identical to SEQ ID NO: 27 or a polypeptide sequence which is at least 60%, 62%, 65%, 67%, 70%, 72%, 75%, 77%, 80%, 82%, 85%, 87%, 90%, 92%, 95%, 97%, 98%, 99% identical to SEQ ID NO: 13. In some embodiments, the variable domain of the second light chain comprises a polypeptide sequence which is at least 60%, 62%, 65%, 67%, 70%, 72%, 75%, 77%, 80%, 82%, 85%, 87%, 90%, 92%, 95%, 97%, 98%, 99% identical to SEQ ID NO: 28 or a polypeptide sequence which is at least 60%, 62%, 65%, 67%, 70%, 72%, 75%, 77%, 80%, 82%, 85%, 87%, 90%, 92%, 95%, 97%, 98%, 99% identical to SEQ ID NO: 14.

[0018] In some embodiments, the variable domain of the first heavy chain comprises SEQ ID NO: 13 or SEQ ID NO: 27. In some embodiments, the variable domain of the first light chain comprises SEQ ID NO: 14 or SEQ ID NO: 28. In some embodiments, the variable domain of the second heavy chain comprises SEQ ID NO: 27 or SEQ ID NO: 13. In some embodiments, the variable domain of the second light chain comprises SEQ ID NO: 28 or SEQ ID NO: 14.

[0019] In some embodiments, the molecule comprises a polypeptide sequence which is at least 60%, 62%, 65%, 67%, 70%, 72%, 75%, 77%, 80%, 82%, 85%, 87%, 90%, 92%, 95%, 97%, 98%, 99% identical to SEQ ID NOs: 59, a polypeptide sequence which is at least 60%, 62%, 65%, 67%, 70%, 72%, 75%, 77%, 80%, 82%, 85%, 87%, 90%, 92%, 95%, 97%, 98%, 99% identical to SEQ ID NO: 60, a polypeptide sequence which is at least 60%, 62%, 65%, 67%, 70%, 72%, 75%, 77%, 80%, 82%, 85%, 87%, 90%, 92%, 95%, 97%, 98%, 99% identical to SEQ ID NO: 61, and a polypeptide sequence which is at least 60%, 62%, 65%, 67%, 70%, 72%, 75%, 77%, 80%, 82%, 85%, 87%, 90%, 92%, 95%, 97%, 98%, 99% identical to SEQ ID NO: 62. In some embodiments, the molecule comprises a polypeptide sequence which is at least 60%, 62%, 65%, 67%, 70%, 72%, 75%, 77%, 80%, 82%, 85%, 87%, 90%, 92%, 95%, 97%, 98%, 99% identical to SEQ ID NOs: 63, a polypeptide sequence which is at least 60%, 62%, 65%, 67%, 70%, 72%, 75%, 77%, 80%, 82%, 85%, 87%, 90%, 92%, 95%, 97%, 98%, 99% identical to SEQ ID NO: 64, a polypeptide sequence which is at least 60%, 62%, 65%, 67%, 70%, 72%, 75%, 77%, 80%, 82%, 85%, 87%, 90%, 92%, 95%, 97%, 98%, 99% identical to SEQ ID NO: 65, and a polypeptide sequence which is at least 60%, 62%, 65%, 67%, 70%, 72%, 75%, 77%, 80%, 82%, 85%, 87%, 90%, 92%, 95%, 97%, 98%, 99% identical to SEQ ID NO: 66. In some embodiments, the molecule comprises a polypeptide sequence which is at least 60%, 62%, 65%, 67%, 70%, 72%, 75%, 77%, 80%, 82%, 85%, 87%, 90%, 92%, 95%, 97%, 98%, 99% identical to SEQ ID NOs: 13, a polypeptide sequence which is at least 60%, 62%, 65%, 67%, 70%, 72%, 75%, 77%, 80%, 82%, 85%, 87%, 90%, 92%, 95%, 97%, 98%, 99% identical to SEQ ID NO: 14, a polypeptide sequence which is at least 60%, 62%, 65%, 67%, 70%, 72%, 75%, 77%, 80%, 82%, 85%, 87%, 90%, 92%, 95%, 97%, 98%, 99% identical to SEQ ID NO: 27, and a polypeptide sequence which is at least 60%, 62%, 65%, 67%, 70%, 72%, 75%, 77%, 80%, 82%, 85%, 87%, 90%, 92%, 95%, 97%, 98%, 99% identical to SEQ ID NO: 28.

[0020] In some embodiments, the molecule comprises SEQ ID NOs: 59, 60, 61, and 62. In some embodiments, the molecule comprises SEQ ID NOs: 63, 64, 65, and 66. In some embodiments, the molecule comprises SEQ ID NOs: 13, 14, 27, and 28.

[0021] In some embodiments, the molecule further comprises one or more disulfide bonds. In some embodiments, the molecule further comprises one or more linker sequences. In some embodiments, the molecule is capable of neutralizing a coronavirus. In some embodiments, the coronavirus is a SARS-CoV-2 virus strain. In some embodiments, the molecule specifically recognizes a first epitope and a second epitope on a SARS-CoV-2 particle. In some embodiments, the first epitope comprises at least a portion of a receptor binding domain (RBD) on a spike protein of a SARS-CoV-2 particle. In some embodiments, the second epitope comprises at least a portion of a N-terminal domain (NTD) on a spike protein of a SARS-CoV-2 particle. In some embodiments, the composition is administered in combination with a second therapeutic agent.

[0022] In certain aspects, the invention provides a method of preventing a COVID-19 infection in a subject in need thereof, the method comprising administering to the subject a composition comprising a bispecific molecule, wherein the bispecific molecule comprises a first polypeptide chain and a second polypeptide chain, wherein: the first polypeptide chain comprises: a first light chain comprising a variable domain and a constant domain; a first heavy chain comprising a variable domain and a constant domain; the second polypeptide chain comprises: a second light chain comprising a variable domain and a constant domain; and a second heavy chain comprising a variable domain and a constant domain.

[0023] In some embodiments, the first polypeptide chain and the second polypeptide chain are covalently bonded to one another. In some embodiments, the first heavy chain comprises a polypeptide sequence which is at least 60%, 62%, 65%, 67%, 70%, 72%, 75%, 77%, 80%, 82%, 85%, 87%, 90%, 92%, 95%, 97%, 98%, 99% identical to SEQ ID NO: 59 or a polypeptide sequence which is at least 60%, 62%, 65%, 67%, 70%, 72%, 75%, 77%, 80%, 82%, 85%, 87%, 90%, 92%, 95%, 97%, 98%, 99% identical to SEQ ID NO: 63. In some embodiments, the first light chain comprises a polypeptide sequence which is at least 60%, 62%, 65%, 67%, 70%, 72%, 75%, 77%, 80%, 82%, 85%, 87%, 90%, 92%, 95%, 97%, 98%, 99% identical to SEQ ID NO: 60 or a polypeptide sequence which is at least 60%, 62%, 65%, 67%, 70%, 72%, 75%, 77%, 80%, 82%, 85%, 87%, 90%, 92%, 95%, 97%, 98%, 99% identical to SEQ ID NO: 64. In some embodiments, the second heavy chain comprises a polypeptide sequence which is at least 60%, 62%, 65%, 67%, 70%, 72%, 75%, 77%, 80%, 82%, 85%, 87%, 90%, 92%, 95%, 97%, 98%, 99% identical to SEQ ID NO: 61 or a polypeptide sequence which is at least 60%, 62%, 65%, 67%, 70%, 72%, 75%, 77%, 80%, 82%, 85%, 87%, 90%, 92%, 95%, 97%, 98%, 99% identical to SEQ ID NO: 65. In some embodiments, the second light chain comprises a polypeptide sequence which is at least 60%, 62%, 65%, 67%, 70%, 72%, 75%, 77%, 80%, 82%, 85%, 87%, 90%, 92%, 95%, 97%, 98%, 99% identical to SEQ ID NO: 62 or a polypeptide sequence which is at least 60%, 62%, 65%, 67%, 70%, 72%, 75%, 77%, 80%, 82%, 85%, 87%, 90%, 92%, 95%, 97%, 98%, 99% identical to SEQ ID NO: 66.

[0024] In some embodiments, the first heavy chain comprises SEQ ID NO: 59 or SEQ ID NO: 63. In some embodiments, the first light chain comprises SEQ ID NO: 60 or SEQ ID NO: 64. In some embodiments, the second heavy chain comprises SEQ ID NO: 61 or SEQ ID NO: 65. In some embodiments, the second light chain comprises SEQ ID NO: 62 or SEQ ID NO: 66.

[0025] In some embodiments, the variable domain of the first heavy chain comprises CDR1, CDR2, and CDR3 of SEQ ID NO: 59 or CDR1, CDR2, and CDR3 of SEQ ID NO: 63. In some embodiments, the variable domain of the first light chain comprises CDR1, CDR2, and CDR3 of SEQ ID NO: 60 or CDR1, CDR2, and CDR3 of SEQ ID NO: 64. In some embodiments, the variable domain of the second heavy chain comprises CDR1, CDR2, and CDR3 of SEQ ID NO: 61 or CDR1, CDR2, and CDR3 of SEQ ID NO: 65. In some embodiments, the variable domain of the second light chain comprises CDR1, CDR2, and CDR3 SEQ ID NO: 62 or CDR1, CDR2, and CDR3 of SEQ ID NO: 66.

[0026] In some embodiments, the variable domain of the first heavy chain comprises a polypeptide sequence which is at least 60%, 62%, 65%, 67%, 70%, 72%, 75%, 77%, 80%, 82%, 85%, 87%, 90%, 92%, 95%, 97%, 98%, 99% identical to SEQ ID NO: 13 or a polypeptide sequence which is at least 60%, 62%, 65%, 67%, 70%, 72%, 75%, 77%, 80%, 82%, 85%, 87%, 90%, 92%, 95%, 97%, 98%, 99% identical to SEQ ID NO: 27. In some embodiments, the variable domain of the first light chain comprises a polypeptide sequence which is at least 60%, 62%, 65%, 67%, 70%, 72%, 75%, 77%, 80%, 82%, 85%, 87%, 90%, 92%, 95%, 97%, 98%, 99% identical to SEQ ID NO: 14 or a polypeptide sequence which is at least 60%, 62%, 65%, 67%, 70%, 72%, 75%, 77%, 80%, 82%, 85%, 87%, 90%, 92%, 95%, 97%, 98%, 99% identical to SEQ ID NO: 28. In some embodiments, the variable domain of the second heavy chain comprises a polypeptide sequence which is at least 60%, 62%, 65%, 67%, 70%, 72%, 75%, 77%, 80%, 82%, 85%, 87%, 90%, 92%, 95%, 97%, 98%, 99% identical to SEQ ID NO: 27 or a polypeptide sequence which is at least 60%, 62%, 65%, 67%, 70%, 72%, 75%, 77%, 80%, 82%, 85%, 87%, 90%, 92%, 95%, 97%, 98%, 99% identical to SEQ ID NO: 13. In some embodiments, the variable domain of the second light chain comprises a polypeptide sequence which is at least 60%, 62%, 65%, 67%, 70%, 72%, 75%, 77%, 80%, 82%, 85%, 87%, 90%, 92%, 95%, 97%, 98%, 99% identical to SEQ ID NO: 28 or a polypeptide sequence which is at least 60%, 62%, 65%, 67%, 70%, 72%, 75%, 77%, 80%, 82%, 85%, 87%, 90%, 92%, 95%, 97%, 98%, 99% identical to SEQ ID NO: 14.

[0027] In some embodiments, the variable domain of the first heavy chain comprises SEQ ID NO: 13 or SEQ ID NO: 27. In some embodiments, the variable domain of the first light chain comprises SEQ ID NO: 14 or SEQ ID NO: 28. In some embodiments, the variable domain of the second heavy chain comprises SEQ ID NO: 27 or SEQ ID NO: 13. In some embodiments, the variable domain of the second light chain comprises SEQ ID NO: 28 or SEQ ID NO: 14.

[0028] In some embodiments, the molecule comprises a polypeptide sequence which is at least 60%, 62%, 65%, 67%, 70%, 72%, 75%, 77%, 80%, 82%, 85%, 87%, 90%, 92%, 95%, 97%, 98%, 99% identical to SEQ ID NOs: 59, a polypeptide sequence which is at least 60%, 62%, 65%, 67%, 70%, 72%, 75%, 77%, 80%, 82%, 85%, 87%, 90%, 92%, 95%, 97%, 98%, 99% identical to SEQ ID NO: 60, a polypeptide sequence which is at least 60%, 62%, 65%, 67%, 70%, 72%, 75%, 77%, 80%, 82%, 85%, 87%, 90%, 92%, 95%, 97%, 98%, 99% identical to SEQ ID NO: 61, and a polypeptide sequence which is at least 60%, 62%, 65%, 67%, 70%, 72%, 75%, 77%, 80%, 82%, 85%, 87%, 90%, 92%, 95%, 97%, 98%, 99% identical to SEQ ID NO: 62. In some embodiments, the molecule comprises a polypeptide sequence which is at least 60%, 62%, 65%, 67%, 70%, 72%, 75%, 77%, 80%, 82%, 85%, 87%, 90%, 92%, 95%, 97%, 98%, 99% identical to SEQ ID NOs: 63, a polypeptide sequence which is at least 60%, 62%, 65%, 67%, 70%, 72%, 75%, 77%, 80%, 82%, 85%, 87%, 90%, 92%, 95%, 97%, 98%, 99% identical to SEQ ID NO: 64, a polypeptide sequence which is at least 60%, 62%, 65%, 67%, 70%, 72%, 75%, 77%, 80%, 82%, 85%, 87%, 90%, 92%, 95%, 97%, 98%, 99% identical to SEQ ID NO: 65, and a polypeptide sequence which is at least 60%, 62%, 65%, 67%, 70%, 72%, 75%, 77%, 80%, 82%, 85%, 87%, 90%, 92%, 95%, 97%, 98%, 99% identical to SEQ ID NO: 66. In some embodiments, the molecule comprises a polypeptide sequence which is at least 60%, 62%, 65%, 67%, 70%, 72%, 75%, 77%, 80%, 82%, 85%, 87%, 90%, 92%, 95%, 97%, 98%, 99% identical to SEQ ID NOs: 13, a polypeptide sequence which is at least 60%, 62%, 65%, 67%, 70%, 72%, 75%, 77%, 80%, 82%, 85%, 87%, 90%, 92%, 95%, 97%, 98%, 99% identical to SEQ ID NO: 14, a polypeptide sequence which is at least 60%, 62%, 65%, 67%, 70%, 72%, 75%, 77%, 80%, 82%, 85%, 87%, 90%, 92%, 95%, 97%, 98%, 99% identical to SEQ ID NO: 27, and a polypeptide sequence which is at least 60%, 62%, 65%, 67%, 70%, 72%, 75%, 77%, 80%, 82%, 85%, 87%, 90%, 92%, 95%, 97%, 98%, 99% identical to SEQ ID NO: 28.

[0029] In some embodiments, the molecule comprises SEQ ID NOs: 59, 60, 61, and 62. In some embodiments, the molecule comprises SEQ ID NOs: 63, 64, 65, and 66. In some embodiments, the molecule comprises SEQ ID NOs: 13, 14, 27, and 28.

[0030] In some embodiments, the molecule further comprises one or more disulfide bonds. In some embodiments, the molecule further comprises one or more linker sequences. In some embodiments, the molecule is capable of neutralizing a coronavirus. In some embodiments, the coronavirus is a SARS-CoV-2 virus strain. In some embodiments, the molecule specifically recognizes a first epitope and a second epitope on a SARS-CoV-2 particle. In some embodiments, the first epitope comprises at least a portion of a receptor binding domain (RBD) on an S protein of a SARS-CoV-2 particle. In some embodiments, the second epitope comprises at least a portion of a N-terminal domain (NTD) on an S protein of a SARS-CoV-2 particle. In some embodiments, the composition is administered in combination with a second therapeutic agent.

[0031] In certain aspects, the invention provides a synthesized monoclonal antibody, or a functional fragment thereof, comprising a heavy chain having a variable domain and a constant domain and a light chain having a variable domain and a constant domain, wherein the antibody binds an antigen on a coronavirus particle.

[0032] In some embodiments, the heavy chain variable domain comprises a polypeptide sequence which is at least 60%, 62%, 65%, 67%, 70%, 72%, 75%, 77%, 80%, 82%, 85%, 87%, 90%, 92%, 95%, 97%, 98%, 99% identical to SEQ ID NO: 15. In some embodiments, the light chain variable domain comprises a polypeptide sequence which is at least 60%, 62%, 65%, 67%, 70%, 72%, 75%, 77%, 80%, 82%, 85%, 87%, 90%, 92%, 95%, 97%, 98%, 99% identical to SEQ ID NO: 16. In some embodiments, the heavy chain variable domain comprises SEQ ID NO: 15. In some embodiments, the light chain variable domain comprises SEQ ID NO: 16.

[0033] In some embodiments, the antibody comprises a polypeptide sequence which is at least 60%, 62%, 65%, 67%, 70%, 72%, 75%, 77%, 80%, 82%, 85%, 87%, 90%, 92%, 95%, 97%, 98%, 99% identical to SEQ ID NO: 15 and a polypeptide sequence which is at least 60%, 62%, 65%, 67%, 70%, 72%, 75%, 77%, 80%, 82%, 85%, 87%, 90%, 92%, 95%, 97%, 98%, 99% identical to SEQ ID NO: 16. In some embodiments, the antibody comprises SEQ ID NO: 15 and SEQ ID NO: 16.

[0034] In some embodiments, the heavy chain variable domain comprises the CDR1, CDR2, and CDR3 regions of SEQ ID NO: 15. In some embodiments, the light chain variable domain comprises the CDR1, CDR2, and CDR3 regions of SEQ ID NO: 16.

[0035] In some embodiments, the antibody neutralizes a coronavirus. In some embodiments, the coronavirus is SARS-CoV-2. In some embodiments, the antibody specifically binds an epitope on the surface of the coronavirus. In some embodiments, the epitope comprises at least a portion of a coronavirus spike protein. In some embodiments, the at least a portion of a coronavirus spike protein comprises a receptor binding domain (RBD) of a spike protein. In some embodiments, the coronavirus is a SARS-CoV-2 coronavirus.

[0036] In certain aspects, the invention provides a method of treating a COVID-19 infection in a subject in need thereof, the method comprising administering to the subject a therapeutically effective amount of a synthesized monoclonal antibody, or a functional fragment thereof, comprising a heavy chain having a variable domain and a constant domain and a light chain having a variable domain and a constant domain, wherein the antibody binds an antigen on a coronavirus particle.

[0037] In some embodiments, the heavy chain variable domain comprises a polypeptide sequence which is at least 60%, 62%, 65%, 67%, 70%, 72%, 75%, 77%, 80%, 82%, 85%, 87%, 90%, 92%, 95%, 97%, 98%, 99% identical to SEQ ID NO: 15. In some embodiments, the light chain variable domain comprises a polypeptide sequence which is at least 60%, 62%, 65%, 67%, 70%, 72%, 75%, 77%, 80%, 82%, 85%, 87%, 90%, 92%, 95%, 97%, 98%, 99% identical to SEQ ID NO: 16. In some embodiments, the heavy chain variable domain comprises SEQ ID NO: 15. In some embodiments, the light chain variable domain comprises SEQ ID NO: 16.

[0038] In some embodiments, the antibody comprises a polypeptide sequence which is at least 60%, 62%, 65%, 67%, 70%, 72%, 75%, 77%, 80%, 82%, 85%, 87%, 90%, 92%, 95%, 97%, 98%, 99% identical to SEQ ID NO: 15 and a polypeptide sequence which is at least 60%, 62%, 65%, 67%, 70%, 72%, 75%, 77%, 80%, 82%, 85%, 87%, 90%, 92%, 95%, 97%, 98%, 99% identical to SEQ ID NO: 16. In some embodiments, the antibody comprises SEQ ID NO: 15 and SEQ ID NO: 16.

[0039] In some embodiments, the heavy chain variable domain comprises the CDR1, CDR2, and CDR3 regions of SEQ ID NO: 15. In some embodiments, the light chain variable domain comprises the CDR1, CDR2, and CDR3 regions of SEQ ID NO: 16.

[0040] In some embodiments, the antibody neutralizes a coronavirus. In some embodiments, the coronavirus is SARS-CoV-2. In some embodiments, the antibody neutralizes a coronavirus. In some embodiments, the coronavirus is SARS-CoV-2. In some embodiments, the antibody specifically binds an epitope on the surface of the coronavirus. In some embodiments, the epitope comprises at least a portion of a coronavirus spike protein. In some embodiments, the at least a portion of a coronavirus spike protein comprises a receptor binding domain (RBD) of a spike protein. In some embodiments, the coronavirus is a SARS-CoV-2 coronavirus. In some embodiments, the antibody is administered in combination with a second pharmaceutical agent.

[0041] In certain aspects, the invention provides a method of preventing a COVID-19 infection in a subject in need thereof, the method comprising administering to the subject a therapeutically effective amount of a synthesized monoclonal antibody, or a functional fragment thereof, comprising a heavy chain having a variable domain and a constant domain and a light chain having a variable and a constant domain, wherein the antibody binds an antigen on a coronavirus particle.

[0042] In some embodiments, the heavy chain variable domain comprises a polypeptide sequence which is at least 60%, 62%, 65%, 67%, 70%, 72%, 75%, 77%, 80%, 82%, 85%, 87%, 90%, 92%, 95%, 97%, 98%, 99% identical to SEQ ID NO: 15. In some embodiments, the light chain variable domain comprises a polypeptide sequence which is at least 60%, 62%, 65%, 67%, 70%, 72%, 75%, 77%, 80%, 82%, 85%, 87%, 90%, 92%, 95%, 97%, 98%, 99% identical to SEQ ID NO: 16. In some embodiments, the heavy chain variable domain comprises SEQ ID NO: 15. In some embodiments, the light chain variable domain comprises SEQ ID NO: 16.

[0043] In some embodiments, the antibody comprises a polypeptide sequence which is at least 60%, 62%, 65%, 67%, 70%, 72%, 75%, 77%, 80%, 82%, 85%, 87%, 90%, 92%, 95%, 97%, 98%, 99% identical to SEQ ID NO: 15 and a polypeptide sequence which is at least 60%, 62%, 65%, 67%, 70%, 72%, 75%, 77%, 80%, 82%, 85%, 87%, 90%, 92%, 95%, 97%, 98%, 99% identical to SEQ ID NO: 16. In some embodiments, the antibody comprises SEQ ID NO: 15 and SEQ ID NO: 16.

[0044] In some embodiments, the heavy chain variable domain comprises the CDR1, CDR2, and CDR3 regions of SEQ ID NO: 15. In some embodiments, the light chain variable domain comprises the CDR1, CDR2, and CDR3 regions of SEQ ID NO: 16.

[0045] In some embodiments, the antibody neutralizes a coronavirus. In some embodiments, the coronavirus is SARS-CoV-2. In some embodiments, the antibody neutralizes a coronavirus. In some embodiments, the coronavirus is SARS-CoV-2. In some embodiments, the antibody specifically binds an epitope on the surface of the coronavirus. In some embodiments, the epitope comprises at least a portion of a coronavirus spike protein. In some embodiments, the at least a portion of a coronavirus spike protein comprises a receptor binding domain (RBD) of a spike protein. In some embodiments, the coronavirus is a SARS-CoV-2 coronavirus. In some embodiments, the antibody is administered in combination with a second pharmaceutical agent.

[0046] In certain aspects, the invention provides a synthesized monoclonal antibody, or a functional fragment thereof, comprising a heavy chain having a variable domain and a constant domain and a light chain having a variable domain and a constant domain, wherein the antibody binds an antigen on a coronavirus particle.

[0047] In some embodiments, the heavy chain variable domain comprises a polypeptide sequence which is at least 60%, 62%, 65%, 67%, 70%, 72%, 75%, 77%, 80%, 82%, 85%, 87%, 90%, 92%, 95%, 97%, 98%, 99% identical to SEQ ID NO: 3, a polypeptide sequence which is at least 60%, 62%, 65%, 67%, 70%, 72%, 75%, 77%, 80%, 82%, 85%, 87%, 90%, 92%, 95%, 97%, 98%, 99% identical to SEQ ID NO: 7, a polypeptide sequence which is at least 60%, 62%, 65%, 67%, 70%, 72%, 75%, 77%, 80%, 82%, 85%, 87%, 90%, 92%, 95%, 97%, 98%, 99% identical to SEQ ID NO: 9, a polypeptide sequence which is at least 60%, 62%, 65%, 67%, 70%, 72%, 75%, 77%, 80%, 82%, 85%, 87%, 90%, 92%, 95%, 97%, 98%, 99% identical to SEQ ID NO: 11, or a polypeptide sequence which is at least 60%, 62%, 65%, 67%, 70%, 72%, 75%, 77%, 80%, 82%, 85%, 87%, 90%, 92%, 95%, 97%, 98%, 99% identical to SEQ ID NO: 17.

[0048] In some embodiments, the heavy chain variable domain comprises a polypeptide sequence which is at least 60%, 62%, 65%, 67%, 70%, 72%, 75%, 77%, 80%, 82%, 85%, 87%, 90%, 92%, 95%, 97%, 98%, 99% identical to SEQ ID NO: 19, a polypeptide sequence which is at least 60%, 62%, 65%, 67%, 70%, 72%, 75%, 77%, 80%, 82%, 85%, 87%, 90%, 92%, 95%, 97%, 98%, 99% identical to SEQ ID NO: 21, a polypeptide sequence which is at least 60%, 62%, 65%, 67%, 70%, 72%, 75%, 77%, 80%, 82%, 85%, 87%, 90%, 92%, 95%, 97%, 98%, 99% identical to SEQ ID NO: 25, a polypeptide sequence which is at least 60%, 62%, 65%, 67%, 70%, 72%, 75%, 77%, 80%, 82%, 85%, 87%, 90%, 92%, 95%, 97%, 98%, 99% identical to SEQ ID NO: 29, or a polypeptide sequence which is at least 60%, 62%, 65%, 67%, 70%, 72%, 75%, 77%, 80%, 82%, 85%, 87%, 90%, 92%, 95%, 97%, 98%, 99% identical to SEQ ID NO: 31.

[0049] In some embodiments, the heavy chain variable domain comprises a polypeptide sequence which is at least 60%, 62%, 65%, 67%, 70%, 72%, 75%, 77%, 80%, 82%, 85%, 87%, 90%, 92%, 95%, 97%, 98%, 99% identical to SEQ ID NO: 33, a polypeptide sequence which is at least 60%, 62%, 65%, 67%, 70%, 72%, 75%, 77%, 80%, 82%, 85%, 87%, 90%, 92%, 95%, 97%, 98%, 99% identical to SEQ ID NO: 37, a polypeptide sequence which is at least 60%, 62%, 65%, 67%, 70%, 72%, 75%, 77%, 80%, 82%, 85%, 87%, 90%, 92%, 95%, 97%, 98%, 99% identical to SEQ ID NO: 39, a polypeptide sequence which is at least 60%, 62%, 65%, 67%, 70%, 72%, 75%, 77%, 80%, 82%, 85%, 87%, 90%, 92%, 95%, 97%, 98%, 99% identical to SEQ ID NO: 43, or a polypeptide sequence which is at least 60%, 62%, 65%, 67%, 70%, 72%, 75%, 77%, 80%, 82%, 85%, 87%, 90%, 92%, 95%, 97%, 98%, 99% identical to SEQ ID NO: 45.

[0050] In some embodiments, the light chain variable domain comprises a polypeptide sequence which is at least 60%, 62%, 65%, 67%, 70%, 72%, 75%, 77%, 80%, 82%, 85%, 87%, 90%, 92%, 95%, 97%, 98%, 99% identical to SEQ ID NO: 4, a polypeptide sequence which is at least 60%, 62%, 65%, 67%, 70%, 72%, 75%, 77%, 80%, 82%, 85%, 87%, 90%, 92%, 95%, 97%, 98%, 99% identical to SEQ ID NO: 8, a polypeptide sequence which is at least 60%, 62%, 65%, 67%, 70%, 72%, 75%, 77%, 80%, 82%, 85%, 87%, 90%, 92%, 95%, 97%, 98%, 99% identical to SEQ ID NO: 10, a polypeptide sequence which is at least 60%, 62%, 65%, 67%, 70%, 72%, 75%, 77%, 80%, 82%, 85%, 87%, 90%, 92%, 95%, 97%, 98%, 99% identical to SEQ ID NO: 12, a polypeptide sequence which is at least 60%, 62%, 65%, 67%, 70%, 72%, 75%, 77%, 80%, 82%, 85%, 87%, 90%, 92%, 95%, 97%, 98%, 99% identical to SEQ ID NO: 18.

[0051] In some embodiments, the light chain variable domain comprises a polypeptide sequence which is at least 60%, 62%, 65%, 67%, 70%, 72%, 75%, 77%, 80%, 82%, 85%, 87%, 90%, 92%, 95%, 97%, 98%, 99% identical to SEQ ID NO: 20, a polypeptide sequence which is at least 60%, 62%, 65%, 67%, 70%, 72%, 75%, 77%, 80%, 82%, 85%, 87%, 90%, 92%, 95%, 97%, 98%, 99% identical to SEQ ID NO: 22, a polypeptide sequence which is at least 60%, 62%, 65%, 67%, 70%, 72%, 75%, 77%, 80%, 82%, 85%, 87%, 90%, 92%, 95%, 97%, 98%, 99% identical to SEQ ID NO: 26, a polypeptide sequence which is at least 60%, 62%, 65%, 67%, 70%, 72%, 75%, 77%, 80%, 82%, 85%, 87%, 90%, 92%, 95%, 97%, 98%, 99% identical to SEQ ID NO: 30, a polypeptide sequence which is at least 60%, 62%, 65%, 67%, 70%, 72%, 75%, 77%, 80%, 82%, 85%, 87%, 90%, 92%, 95%, 97%, 98%, 99% identical to SEQ ID NO: 32.

[0052] In some embodiments, the light chain variable domain comprises a polypeptide sequence which is at least 60%, 62%, 65%, 67%, 70%, 72%, 75%, 77%, 80%, 82%, 85%, 87%, 90%, 92%, 95%, 97%, 98%, 99% identical to SEQ ID NO: 34, a polypeptide sequence which is at least 60%, 62%, 65%, 67%, 70%, 72%, 75%, 77%, 80%, 82%, 85%, 87%, 90%, 92%, 95%, 97%, 98%, 99% identical to SEQ ID NO: 38, a polypeptide sequence which is at least 60%, 62%, 65%, 67%, 70%, 72%, 75%, 77%, 80%, 82%, 85%, 87%, 90%, 92%, 95%, 97%, 98%, 99% identical to SEQ ID NO: 40, a polypeptide sequence which is at least 60%, 62%, 65%, 67%, 70%, 72%, 75%, 77%, 80%, 82%, 85%, 87%, 90%, 92%, 95%, 97%, 98%, 99% identical to SEQ ID NO: 44, a polypeptide sequence which is at least 60%, 62%, 65%, 67%, 70%, 72%, 75%, 77%, 80%, 82%, 85%, 87%, 90%, 92%, 95%, 97%, 98%, 99% identical to SEQ ID NO: 46.

[0053] In some embodiments, the heavy chain variable domain comprises a polypeptide sequence which is at least 60%, 62%, 65%, 67%, 70%, 72%, 75%, 77%, 80%, 82%, 85%, 87%, 90%, 92%, 95%, 97%, 98%, 99% identical to SEQ ID NO: 3 and the light chain variable domain comprises a polypeptide sequence which is at least 60%, 62%, 65%, 67%, 70%, 72%, 75%, 77%, 80%, 82%, 85%, 87%, 90%, 92%, 95%, 97%, 98%, 99% identical to SEQ ID NO: 4. In some embodiments, the heavy chain variable domain comprises a polypeptide sequence which is at least 60%, 62%, 65%, 67%, 70%, 72%, 75%, 77%, 80%, 82%, 85%, 87%, 90%, 92%, 95%, 97%, 98%, 99% identical to SEQ ID NO: 7 and the light chain variable domain comprises a polypeptide sequence which is at least 60%, 62%, 65%, 67%, 70%, 72%, 75%, 77%, 80%, 82%, 85%, 87%, 90%, 92%, 95%, 97%, 98%, 99% identical to SEQ ID NO: 8. In some embodiments, the heavy chain variable domain comprises a polypeptide sequence which is at least 60%, 62%, 65%, 67%, 70%, 72%, 75%, 77%, 80%, 82%, 85%, 87%, 90%, 92%, 95%, 97%, 98%, 99% identical to SEQ ID NO: 9 and the light chain variable domain comprises a polypeptide sequence which is at least 60%, 62%, 65%, 67%, 70%, 72%, 75%, 77%, 80%, 82%, 85%, 87%, 90%, 92%, 95%, 97%, 98%, 99% identical to SEQ ID NO: 10. In some embodiments, the heavy chain variable domain comprises a polypeptide sequence which is at least 60%, 62%, 65%, 67%, 70%, 72%, 75%, 77%, 80%, 82%, 85%, 87%, 90%, 92%, 95%, 97%, 98%, 99% identical to SEQ ID NO: 11 and the light chain variable domain comprises a polypeptide sequence which is at least 60%, 62%, 65%, 67%, 70%, 72%, 75%, 77%, 80%, 82%, 85%, 87%, 90%, 92%, 95%, 97%, 98%, 99% identical to SEQ ID NO: 12. In some embodiments, the heavy chain variable domain comprises a polypeptide sequence which is at least 60%, 62%, 65%, 67%, 70%, 72%, 75%, 77%, 80%, 82%, 85%, 87%, 90%, 92%, 95%, 97%, 98%, 99% identical to SEQ ID NO: 17 and the light chain variable domain comprises a polypeptide sequence which is at least 60%, 62%, 65%, 67%, 70%, 72%, 75%, 77%, 80%, 82%, 85%, 87%, 90%, 92%, 95%, 97%, 98%, 99% identical to SEQ ID NO: 18. In some embodiments, the heavy chain variable domain comprises a polypeptide sequence which is at least 60%, 62%, 65%, 67%, 70%, 72%, 75%, 77%, 80%, 82%, 85%, 87%, 90%, 92%, 95%, 97%, 98%, 99% identical to SEQ ID NO: 19 and the light chain variable domain comprises a polypeptide sequence which is at least 60%, 62%, 65%, 67%, 70%, 72%, 75%, 77%, 80%, 82%, 85%, 87%, 90%, 92%, 95%, 97%, 98%, 99% identical to SEQ ID NO: 20. In some embodiments, the heavy chain variable domain comprises a polypeptide sequence which is at least 60%, 62%, 65%, 67%, 70%, 72%, 75%, 77%, 80%, 82%, 85%, 87%, 90%, 92%, 95%, 97%, 98%, 99% identical to SEQ ID NO: 21 and the light chain variable domain comprises a polypeptide sequence which is at least 60%, 62%, 65%, 67%, 70%, 72%, 75%, 77%, 80%, 82%, 85%, 87%, 90%, 92%, 95%, 97%, 98%, 99% identical to SEQ ID NO: 22. In some embodiments, the heavy chain variable domain comprises a polypeptide sequence which is at least 60%, 62%, 65%, 67%, 70%, 72%, 75%, 77%, 80%, 82%, 85%, 87%, 90%, 92%, 95%, 97%, 98%, 99% identical to SEQ ID NO: 25 and the light chain variable domain comprises a polypeptide sequence which is at least 60%, 62%, 65%, 67%, 70%, 72%, 75%, 77%, 80%, 82%, 85%, 87%, 90%, 92%, 95%, 97%, 98%, 99% identical to SEQ ID NO: 26. In some embodiments, the heavy chain variable domain comprises a polypeptide sequence which is at least 60%, 62%, 65%, 67%, 70%, 72%, 75%, 77%, 80%, 82%, 85%, 87%, 90%, 92%, 95%, 97%, 98%, 99% identical to SEQ ID NO: 29 and the light chain variable domain comprises a polypeptide sequence which is at least 60%, 62%, 65%, 67%, 70%, 72%, 75%, 77%, 80%, 82%, 85%, 87%, 90%, 92%, 95%, 97%, 98%, 99% identical to SEQ ID NO: 30.

[0054] In some embodiments, the heavy chain variable domain comprises a polypeptide sequence which is at least 60%, 62%, 65%, 67%, 70%, 72%, 75%, 77%, 80%, 82%, 85%, 87%, 90%, 92%, 95%, 97%, 98%, 99% identical to SEQ ID NO: 31 and the light chain variable domain comprises a polypeptide sequence which is at least 60%, 62%, 65%, 67%, 70%, 72%, 75%, 77%, 80%, 82%, 85%, 87%, 90%, 92%, 95%, 97%, 98%, 99% identical to SEQ ID NO: 32. In some embodiments, the heavy chain variable domain comprises a polypeptide sequence which is at least 60%, 62%, 65%, 67%, 70%, 72%, 75%, 77%, 80%, 82%, 85%, 87%, 90%, 92%, 95%, 97%, 98%, 99% identical to SEQ ID NO: 33 and the light chain variable domain comprises a polypeptide sequence which is at least 60%, 62%, 65%, 67%, 70%, 72%, 75%, 77%, 80%, 82%, 85%, 87%, 90%, 92%, 95%, 97%, 98%, 99% identical to SEQ ID NO: 34. In some embodiments, the heavy chain variable domain comprises a polypeptide sequence which is at least 60%, 62%, 65%, 67%, 70%, 72%, 75%, 77%, 80%, 82%, 85%, 87%, 90%, 92%, 95%, 97%, 98%, 99% identical to SEQ ID NO: 37 and the light chain variable domain comprises a polypeptide sequence which is at least 60%, 62%, 65%, 67%, 70%, 72%, 75%, 77%, 80%, 82%, 85%, 87%, 90%, 92%, 95%, 97%, 98%, 99% identical to SEQ ID NO: 38. In some embodiments, the heavy chain variable domain comprises a polypeptide sequence which is at least 60%, 62%, 65%, 67%, 70%, 72%, 75%, 77%, 80%, 82%, 85%, 87%, 90%, 92%, 95%, 97%, 98%, 99% identical to SEQ ID NO: 39 and the light chain variable domain comprises a polypeptide sequence which is at least 60%, 62%, 65%, 67%, 70%, 72%, 75%, 77%, 80%, 82%, 85%, 87%, 90%, 92%, 95%, 97%, 98%, 99% identical to SEQ ID NO: 40. In some embodiments, the heavy chain variable domain comprises a polypeptide sequence which is at least 60%, 62%, 65%, 67%, 70%, 72%, 75%, 77%, 80%, 82%, 85%, 87%, 90%, 92%, 95%, 97%, 98%, 99% identical to SEQ ID NO: 43 and the light chain variable domain comprises a polypeptide sequence which is at least 60%, 62%, 65%, 67%, 70%, 72%, 75%, 77%, 80%, 82%, 85%, 87%, 90%, 92%, 95%, 97%, 98%, 99% identical to SEQ ID NO: 44. In some embodiments, the heavy chain variable domain comprises a polypeptide sequence which is at least 60%, 62%, 65%, 67%, 70%, 72%, 75%, 77%, 80%, 82%, 85%, 87%, 90%, 92%, 95%, 97%, 98%, 99% identical to SEQ ID NO: 45 and the light chain variable domain comprises a polypeptide sequence which is at least 60%, 62%, 65%, 67%, 70%, 72%, 75%, 77%, 80%, 82%, 85%, 87%, 90%, 92%, 95%, 97%, 98%, 99% identical to SEQ ID NO: 46.

[0055] In some embodiments, the heavy chain variable domain comprises SEQ ID NO: 3 and the light chain variable domain comprises SEQ ID NO: 4. In some embodiments, the heavy chain variable domain comprises SEQ ID NO: 7 and the light chain variable domain comprises SEQ ID NO: 8. In some embodiments, the heavy chain variable domain comprises SEQ ID NO: 9 and the light chain variable domain comprises SEQ ID NO: 10. In some embodiments, the heavy chain variable domain comprises SEQ ID NO: 11 and the light chain variable domain comprises SEQ ID NO: 12. In some embodiments, the heavy chain variable domain comprises SEQ ID NO: 17 and the light chain variable domain comprises SEQ ID NO: 18. In some embodiments, the heavy chain variable domain comprises SEQ ID NO: 19 and the light chain variable domain comprises SEQ ID NO: 20. In some embodiments, the heavy chain variable domain comprises SEQ ID NO: 21 and the light chain variable domain comprises SEQ ID NO: 22. In some embodiments, the heavy chain variable domain comprises SEQ ID NO: 25 and the light chain variable domain comprises SEQ ID NO: 26. In some embodiments, the heavy chain variable domain comprises SEQ ID NO: 29 and the light chain variable domain comprises SEQ ID NO: 30. In some embodiments, the heavy chain variable domain comprises SEQ ID NO: 31 and the light chain variable domain comprises SEQ ID NO: 32. In some embodiments, the heavy chain variable domain comprises SEQ ID NO: 33 and the light chain variable domain comprises SEQ ID NO: 34. In some embodiments, the heavy chain variable domain comprises SEQ ID NO: 37 and the light chain variable domain comprises SEQ ID NO: 38. In some embodiments, the heavy chain variable domain comprises SEQ ID NO: 39 and the light chain variable domain comprises SEQ ID NO: 40. In some embodiments, the heavy chain variable domain comprises SEQ ID NO: 43 and the light chain variable domain comprises SEQ ID NO: 44. In some embodiments, the heavy chain variable domain comprises SEQ ID NO: 45 and the light chain variable domain comprises SEQ ID NO: 46.

[0056] In some embodiments, the heavy chain variable domain comprises the CDR1, CDR2, and CDR3 regions of SEQ ID NO: 3; the CDR1, CDR2, and CDR3 regions of SEQ ID NO: 7; the CDR1, CDR2, and CDR3 regions of SEQ ID NO: 9; the CDR1, CDR2, and CDR3 regions of SEQ ID NO: 11; or the CDR1, CDR2, and CDR3 regions of SEQ ID NO: 17. In some embodiments, the heavy chain variable domain comprises the CDR1, CDR2, and CDR3 regions of SEQ ID NO: 19; the CDR1, CDR2, and CDR3 regions of SEQ ID NO: 21; the CDR1, CDR2, and CDR3 regions of SEQ ID NO: 25; the CDR1, CDR2, and CDR3 regions of SEQ ID NO: 29; or the CDR1, CDR2, and CDR3 regions of SEQ ID NO: 31. In some embodiments, the heavy chain variable domain comprises the CDR1, CDR2, and CDR3 regions of SEQ ID NO: 33; the CDR1, CDR2, and CDR3 regions of SEQ ID NO: 37; the CDR1, CDR2, and CDR3 regions of SEQ ID NO: 39; the CDR1, CDR2, and CDR3 regions of SEQ ID NO: 43; or the CDR1, CDR2, and CDR3 regions of SEQ ID NO: 45. In some embodiments, the light chain variable domain comprises the CDR1, CDR2, and CDR3 regions of SEQ ID NO: 4; the CDR1, CDR2, and CDR3 regions of SEQ ID NO: 8; the CDR1, CDR2, and CDR3 regions of SEQ ID NO: 10; the CDR1, CDR2, and CDR3 regions of SEQ ID NO: 12; or the CDR1, CDR2, and CDR3 regions of SEQ ID NO: 18. In some embodiments, the light chain variable domain comprises the CDR1, CDR2, and CDR3 regions of SEQ ID NO: 20; the CDR1, CDR2, and CDR3 regions of SEQ ID NO: 22; the CDR1, CDR2, and CDR3 regions of SEQ ID NO: 26; the CDR1, CDR2, and CDR3 regions of SEQ ID NO: 30; or the CDR1, CDR2, and CDR3 regions of SEQ ID NO: 32. In some embodiments, the light chain variable domain comprises the CDR1, CDR2, and CDR3 regions of SEQ ID NO: 34; the CDR1, CDR2, and CDR3 regions of SEQ ID NO: 38; the CDR1, CDR2, and CDR3 regions of SEQ ID NO: 40; the CDR1, CDR2, and CDR3 regions of SEQ ID NO: 44; or the CDR1, CDR2, and CDR3 regions of SEQ ID NO: 46.

[0057] In some embodiments, the antibody neutralizes a coronavirus. In some embodiments, the coronavirus is a SARS-CoV-2 virus. In some embodiments, the coronavirus is a SARS-CoV-2 variant strain. In some embodiments, the variant strain is selected from the group consisting of WA1, B.1.1.7, B1.526, B1.351, P1, B1.352, and B.1.427.

[0058] In some embodiments, the antibody specifically binds an epitope on the surface of the coronavirus. In some embodiments, the epitope comprises at least a portion of a coronavirus spike protein. In some embodiments, the at least a portion of a coronavirus spike protein comprises a receptor binding domain (RBD) of a spike protein. In some embodiments, the at least a portion of a coronavirus spike protein comprises a N-Terminal domain (NTD) of a spike protein. In some embodiments, the coronavirus is a SARS-CoV-2 coronavirus.

[0059] In certain aspects, the invention provides a method of treating or preventing a COVID-19 infection in a subject in need thereof, the method comprising administering to the subject a therapeutically effective amount of a synthesized monoclonal antibody, or a functional fragment thereof, comprising a heavy chain having a variable domain and a constant domain and a light chain having a variable domain and a constant domain, wherein the antibody binds an antigen on a coronavirus particle.

[0060] In some embodiments, the heavy chain variable domain comprises a polypeptide sequence which is at least 60%, 62%, 65%, 67%, 70%, 72%, 75%, 77%, 80%, 82%, 85%, 87%, 90%, 92%, 95%, 97%, 98%, 99% identical to SEQ ID NO: 3, a polypeptide sequence which is at least 60%, 62%, 65%, 67%, 70%, 72%, 75%, 77%, 80%, 82%, 85%, 87%, 90%, 92%, 95%, 97%, 98%, 99% identical to SEQ ID NO: 7, a polypeptide sequence which is at least 60%, 62%, 65%, 67%, 70%, 72%, 75%, 77%, 80%, 82%, 85%, 87%, 90%, 92%, 95%, 97%, 98%, 99% identical to SEQ ID NO: 9, a polypeptide sequence which is at least 60%, 62%, 65%, 67%, 70%, 72%, 75%, 77%, 80%, 82%, 85%, 87%, 90%, 92%, 95%, 97%, 98%, 99% identical to SEQ ID NO: 11, or a polypeptide sequence which is at least 60%, 62%, 65%, 67%, 70%, 72%, 75%, 77%, 80%, 82%, 85%, 87%, 90%, 92%, 95%, 97%, 98%, 99% identical to SEQ ID NO: 17.

[0061] In some embodiments, the heavy chain variable domain comprises a polypeptide sequence which is at least 60%, 62%, 65%, 67%, 70%, 72%, 75%, 77%, 80%, 82%, 85%, 87%, 90%, 92%, 95%, 97%, 98%, 99% identical to SEQ ID NO: 19, a polypeptide sequence which is at least 60%, 62%, 65%, 67%, 70%, 72%, 75%, 77%, 80%, 82%, 85%, 87%, 90%, 92%, 95%, 97%, 98%, 99% identical to SEQ ID NO: 21, a polypeptide sequence which is at least 60%, 62%, 65%, 67%, 70%, 72%, 75%, 77%, 80%, 82%, 85%, 87%, 90%, 92%, 95%, 97%, 98%, 99% identical to SEQ ID NO: 25, a polypeptide sequence which is at least 60%, 62%, 65%, 67%, 70%, 72%, 75%, 77%, 80%, 82%, 85%, 87%, 90%, 92%, 95%, 97%, 98%, 99% identical to SEQ ID NO: 29, or a polypeptide sequence which is at least 60%, 62%, 65%, 67%, 70%, 72%, 75%, 77%, 80%, 82%, 85%, 87%, 90%, 92%, 95%, 97%, 98%, 99% identical to SEQ ID NO: 31.

[0062] In some embodiments, the heavy chain variable domain comprises a polypeptide sequence which is at least 60%, 62%, 65%, 67%, 70%, 72%, 75%, 77%, 80%, 82%, 85%, 87%, 90%, 92%, 95%, 97%, 98%, 99% identical to SEQ ID NO: 33, a polypeptide sequence which is at least 60%, 62%, 65%, 67%, 70%, 72%, 75%, 77%, 80%, 82%, 85%, 87%, 90%, 92%, 95%, 97%, 98%, 99% identical to SEQ ID NO: 37, a polypeptide sequence which is at least 60%, 62%, 65%, 67%, 70%, 72%, 75%, 77%, 80%, 82%, 85%, 87%, 90%, 92%, 95%, 97%, 98%, 99% identical to SEQ ID NO: 39, a polypeptide sequence which is at least 60%, 62%, 65%, 67%, 70%, 72%, 75%, 77%, 80%, 82%, 85%, 87%, 90%, 92%, 95%, 97%, 98%, 99% identical to SEQ ID NO: 43, or a polypeptide sequence which is at least 60%, 62%, 65%, 67%, 70%, 72%, 75%, 77%, 80%, 82%, 85%, 87%, 90%, 92%, 95%, 97%, 98%, 99% identical to SEQ ID NO: 45.

[0063] In some embodiments, the light chain variable domain comprises a polypeptide sequence which is at least 60%, 62%, 65%, 67%, 70%, 72%, 75%, 77%, 80%, 82%, 85%, 87%, 90%, 92%, 95%, 97%, 98%, 99% identical to SEQ ID NO: 4, a polypeptide sequence which is at least 60%, 62%, 65%, 67%, 70%, 72%, 75%, 77%, 80%, 82%, 85%, 87%, 90%, 92%, 95%, 97%, 98%, 99% identical to SEQ ID NO: 8, a polypeptide sequence which is at least 60%, 62%, 65%, 67%, 70%, 72%, 75%, 77%, 80%, 82%, 85%, 87%, 90%, 92%, 95%, 97%, 98%, 99% identical to SEQ ID NO: 10, a polypeptide sequence which is at least 60%, 62%, 65%, 67%, 70%, 72%, 75%, 77%, 80%, 82%, 85%, 87%, 90%, 92%, 95%, 97%, 98%, 99% identical to SEQ ID NO: 12, a polypeptide sequence which is at least 60%, 62%, 65%, 67%, 70%, 72%, 75%, 77%, 80%, 82%, 85%, 87%, 90%, 92%, 95%, 97%, 98%, 99% identical to SEQ ID NO: 18.

[0064] In some embodiments, the light chain variable domain comprises a polypeptide sequence which is at least 60%, 62%, 65%, 67%, 70%, 72%, 75%, 77%, 80%, 82%, 85%, 87%, 90%, 92%, 95%, 97%, 98%, 99% identical to SEQ ID NO: 20, a polypeptide sequence which is at least 60%, 62%, 65%, 67%, 70%, 72%, 75%, 77%, 80%, 82%, 85%, 87%, 90%, 92%, 95%, 97%, 98%, 99% identical to SEQ ID NO: 22, a polypeptide sequence which is at least 60%, 62%, 65%, 67%, 70%, 72%, 75%, 77%, 80%, 82%, 85%, 87%, 90%, 92%, 95%, 97%, 98%, 99% identical to SEQ ID NO: 26, a polypeptide sequence which is at least 60%, 62%, 65%, 67%, 70%, 72%, 75%, 77%, 80%, 82%, 85%, 87%, 90%, 92%, 95%, 97%, 98%, 99% identical to SEQ ID NO: 30, a polypeptide sequence which is at least 60%, 62%, 65%, 67%, 70%, 72%, 75%, 77%, 80%, 82%, 85%, 87%, 90%, 92%, 95%, 97%, 98%, 99% identical to SEQ ID NO: 32.

[0065] In some embodiments, the light chain variable domain comprises a polypeptide sequence which is at least 60%, 62%, 65%, 67%, 70%, 72%, 75%, 77%, 80%, 82%, 85%, 87%, 90%, 92%, 95%, 97%, 98%, 99% identical to SEQ ID NO: 34, a polypeptide sequence which is at least 60%, 62%, 65%, 67%, 70%, 72%, 75%, 77%, 80%, 82%, 85%, 87%, 90%, 92%, 95%, 97%, 98%, 99% identical to SEQ ID NO: 38, a polypeptide sequence which is at least 60%, 62%, 65%, 67%, 70%, 72%, 75%, 77%, 80%, 82%, 85%, 87%, 90%, 92%, 95%, 97%, 98%, 99% identical to SEQ ID NO: 40, a polypeptide sequence which is at least 60%, 62%, 65%, 67%, 70%, 72%, 75%, 77%, 80%, 82%, 85%, 87%, 90%, 92%, 95%, 97%, 98%, 99% identical to SEQ ID NO: 44, a polypeptide sequence which is at least 60%, 62%, 65%, 67%, 70%, 72%, 75%, 77%, 80%, 82%, 85%, 87%, 90%, 92%, 95%, 97%, 98%, 99% identical to SEQ ID NO: 46.

[0066] In some embodiments, the heavy chain variable domain comprises a polypeptide sequence which is at least 60%, 62%, 65%, 67%, 70%, 72%, 75%, 77%, 80%, 82%, 85%, 87%, 90%, 92%, 95%, 97%, 98%, 99% identical to SEQ ID NO: 3 and the light chain variable domain comprises a polypeptide sequence which is at least 60%, 62%, 65%, 67%, 70%, 72%, 75%, 77%, 80%, 82%, 85%, 87%, 90%, 92%, 95%, 97%, 98%, 99% identical to SEQ ID NO: 4. In some embodiments, the heavy chain variable domain comprises a polypeptide sequence which is at least 60%, 62%, 65%, 67%, 70%, 72%, 75%, 77%, 80%, 82%, 85%, 87%, 90%, 92%, 95%, 97%, 98%, 99% identical to SEQ ID NO: 7 and the light chain variable domain comprises a polypeptide sequence which is at least 60%, 62%, 65%, 67%, 70%, 72%, 75%, 77%, 80%, 82%, 85%, 87%, 90%, 92%, 95%, 97%, 98%, 99% identical to SEQ ID NO: 8. In some embodiments, the heavy chain variable domain comprises a polypeptide sequence which is at least 60%, 62%, 65%, 67%, 70%, 72%, 75%, 77%, 80%, 82%, 85%, 87%, 90%, 92%, 95%, 97%, 98%, 99% identical to SEQ ID NO: 9 and the light chain variable domain comprises a polypeptide sequence which is at least 60%, 62%, 65%, 67%, 70%, 72%, 75%, 77%, 80%, 82%, 85%, 87%, 90%, 92%, 95%, 97%, 98%, 99% identical to SEQ ID NO: 10. In some embodiments, the heavy chain variable domain comprises a polypeptide sequence which is at least 60%, 62%, 65%, 67%, 70%, 72%, 75%, 77%, 80%, 82%, 85%, 87%, 90%, 92%, 95%, 97%, 98%, 99% identical to SEQ ID NO: 11 and the light chain variable domain comprises a polypeptide sequence which is at least 60%, 62%, 65%, 67%, 70%, 72%, 75%, 77%, 80%, 82%, 85%, 87%, 90%, 92%, 95%, 97%, 98%, 99% identical to SEQ ID NO: 12. In some embodiments, the heavy chain variable domain comprises a polypeptide sequence which is at least 60%, 62%, 65%, 67%, 70%, 72%, 75%, 77%, 80%, 82%, 85%, 87%, 90%, 92%, 95%, 97%, 98%, 99% identical to SEQ ID NO: 17 and the light chain variable domain comprises a polypeptide sequence which is at least 60%, 62%, 65%, 67%, 70%, 72%, 75%, 77%, 80%, 82%, 85%, 87%, 90%, 92%, 95%, 97%, 98%, 99% identical to SEQ ID NO: 18. In some embodiments, the heavy chain variable domain comprises a polypeptide sequence which is at least 60%, 62%, 65%, 67%, 70%, 72%, 75%, 77%, 80%, 82%, 85%, 87%, 90%, 92%, 95%, 97%, 98%, 99% identical to SEQ ID NO: 19 and the light chain variable domain comprises a polypeptide sequence which is at least 60%, 62%, 65%, 67%, 70%, 72%, 75%, 77%, 80%, 82%, 85%, 87%, 90%, 92%, 95%, 97%, 98%, 99% identical to SEQ ID NO: 20.

[0067] In some embodiments, the heavy chain variable domain comprises a polypeptide sequence which is at least 60%, 62%, 65%, 67%, 70%, 72%, 75%, 77%, 80%, 82%, 85%, 87%, 90%, 92%, 95%, 97%, 98%, 99% identical to SEQ ID NO: 21 and the light chain variable domain comprises a polypeptide sequence which is at least 60%, 62%, 65%, 67%, 70%, 72%, 75%, 77%, 80%, 82%, 85%, 87%, 90%, 92%, 95%, 97%, 98%, 99% identical to SEQ ID NO: 22. In some embodiments, the heavy chain variable domain comprises a polypeptide sequence which is at least 60%, 62%, 65%, 67%, 70%, 72%, 75%, 77%, 80%, 82%, 85%, 87%, 90%, 92%, 95%, 97%, 98%, 99% identical to SEQ ID NO: 25 and the light chain variable domain comprises a polypeptide sequence which is at least 60%, 62%, 65%, 67%, 70%, 72%, 75%, 77%, 80%, 82%, 85%, 87%, 90%, 92%, 95%, 97%, 98%, 99% identical to SEQ ID NO: 26. In some embodiments, the heavy chain variable domain comprises a polypeptide sequence which is at least 60%, 62%, 65%, 67%, 70%, 72%, 75%, 77%, 80%, 82%, 85%, 87%, 90%, 92%, 95%, 97%, 98%, 99% identical to SEQ ID NO: 29 and the light chain variable domain comprises a polypeptide sequence which is at least 60%, 62%, 65%, 67%, 70%, 72%, 75%, 77%, 80%, 82%, 85%, 87%, 90%, 92%, 95%, 97%, 98%, 99% identical to SEQ ID NO: 30. In some embodiments, the heavy chain variable domain comprises a polypeptide sequence which is at least 60%, 62%, 65%, 67%, 70%, 72%, 75%, 77%, 80%, 82%, 85%, 87%, 90%, 92%, 95%, 97%, 98%, 99% identical to SEQ ID NO: 31 and the light chain variable domain comprises a polypeptide sequence which is at least 60%, 62%, 65%, 67%, 70%, 72%, 75%, 77%, 80%, 82%, 85%, 87%, 90%, 92%, 95%, 97%, 98%, 99% identical to SEQ ID NO: 32. In some embodiments, the heavy chain variable domain comprises a polypeptide sequence which is at least 60%, 62%, 65%, 67%, 70%, 72%, 75%, 77%, 80%, 82%, 85%, 87%, 90%, 92%, 95%, 97%, 98%, 99% identical to SEQ ID NO: 33 and the light chain variable domain comprises a polypeptide sequence which is at least 60%, 62%, 65%, 67%, 70%, 72%, 75%, 77%, 80%, 82%, 85%, 87%, 90%, 92%, 95%, 97%, 98%, 99% identical to SEQ ID NO: 34. In some embodiments, the heavy chain variable domain comprises a polypeptide sequence which is at least 60%, 62%, 65%, 67%, 70%, 72%, 75%, 77%, 80%, 82%, 85%, 87%, 90%, 92%, 95%, 97%, 98%, 99% identical to SEQ ID NO: 37 and the light chain variable domain comprises a polypeptide sequence which is at least 60%, 62%, 65%, 67%, 70%, 72%, 75%, 77%, 80%, 82%, 85%, 87%, 90%, 92%, 95%, 97%, 98%, 99% identical to SEQ ID NO: 38.

[0068] In some embodiments, the heavy chain variable domain comprises a polypeptide sequence which is at least 60%, 62%, 65%, 67%, 70%, 72%, 75%, 77%, 80%, 82%, 85%, 87%, 90%, 92%, 95%, 97%, 98%, 99% identical to SEQ ID NO: 39 and the light chain variable domain comprises a polypeptide sequence which is at least 60%, 62%, 65%, 67%, 70%, 72%, 75%, 77%, 80%, 82%, 85%, 87%, 90%, 92%, 95%, 97%, 98%, 99% identical to SEQ ID NO: 40. In some embodiments, the heavy chain variable domain comprises a polypeptide sequence which is at least 60%, 62%, 65%, 67%, 70%, 72%, 75%, 77%, 80%, 82%, 85%, 87%, 90%, 92%, 95%, 97%, 98%, 99% identical to SEQ ID NO: 43 and the light chain variable domain comprises a polypeptide sequence which is at least 60%, 62%, 65%, 67%, 70%, 72%, 75%, 77%, 80%, 82%, 85%, 87%, 90%, 92%, 95%, 97%, 98%, 99% identical to SEQ ID NO: 44. In some embodiments, the heavy chain variable domain comprises a polypeptide sequence which is at least 60%, 62%, 65%, 67%, 70%, 72%, 75%, 77%, 80%, 82%, 85%, 87%, 90%, 92%, 95%, 97%, 98%, 99% identical to SEQ ID NO: 45 and the light chain variable domain comprises a polypeptide sequence which is at least 60%, 62%, 65%, 67%, 70%, 72%, 75%, 77%, 80%, 82%, 85%, 87%, 90%, 92%, 95%, 97%, 98%, 99% identical to SEQ ID NO: 46.

[0069] In some embodiments, the heavy chain variable domain comprises SEQ ID NO: 3 and the light chain variable domain comprises SEQ ID NO: 4. In some embodiments, the heavy chain variable domain comprises SEQ ID NO: 7 and the light chain variable domain comprises SEQ ID NO: 8. In some embodiments, the heavy chain variable domain comprises SEQ ID NO: 9 and the light chain variable domain comprises SEQ ID NO: 10. In some embodiments, the heavy chain variable domain comprises SEQ ID NO: 11 and the light chain variable domain comprises SEQ ID NO: 12. In some embodiments, the heavy chain variable domain comprises SEQ ID NO: 17 and the light chain variable domain comprises SEQ ID NO: 18. In some embodiments, the heavy chain variable domain comprises SEQ ID NO: 19 and the light chain variable domain comprises SEQ ID NO: 20. In some embodiments, the heavy chain variable domain comprises SEQ ID NO: 21 and the light chain variable domain comprises SEQ ID NO: 22. In some embodiments, the heavy chain variable domain comprises SEQ ID NO: 25 and the light chain variable domain comprises SEQ ID NO: 26. In some embodiments, the heavy chain variable domain comprises SEQ ID NO: 29 and the light chain variable domain comprises SEQ ID NO: 30. In some embodiments, the heavy chain variable domain comprises SEQ ID NO: 31 and the light chain variable domain comprises SEQ ID NO: 32. In some embodiments, the heavy chain variable domain comprises SEQ ID NO: 33 and the light chain variable domain comprises SEQ ID NO: 34. In some embodiments, the heavy chain variable domain comprises SEQ ID NO: 37 and the light chain variable domain comprises SEQ ID NO: 38. In some embodiments, the heavy chain variable domain comprises SEQ ID NO: 39 and the light chain variable domain comprises SEQ ID NO: 40. In some embodiments, the heavy chain variable domain comprises SEQ ID NO: 43 and the light chain variable domain comprises SEQ ID NO: 44. In some embodiments, the heavy chain variable domain comprises SEQ ID NO: 45 and the light chain variable domain comprises SEQ ID NO: 46.

[0070] In some embodiments, the heavy chain variable domain comprises the CDR1, CDR2, and CDR3 regions of SEQ ID NO: 3; the CDR1, CDR2, and CDR3 regions of SEQ ID NO: 7; the CDR1, CDR2, and CDR3 regions of SEQ ID NO: 9; the CDR1, CDR2, and CDR3 regions of SEQ ID NO: 11; or the CDR1, CDR2, and CDR3 regions of SEQ ID NO: 17. In some embodiments, the heavy chain variable domain comprises the CDR1, CDR2, and CDR3 regions of SEQ ID NO: 19; the CDR1, CDR2, and CDR3 regions of SEQ ID NO: 21; the CDR1, CDR2, and CDR3 regions of SEQ ID NO: 25; the CDR1, CDR2, and CDR3 regions of SEQ ID NO: 29; or the CDR1, CDR2, and CDR3 regions of SEQ ID NO: 31. In some embodiments, the heavy chain variable domain comprises the CDR1, CDR2, and CDR3 regions of SEQ ID NO: 33; the CDR1, CDR2, and CDR3 regions of SEQ ID NO: 37; the CDR1, CDR2, and CDR3 regions of SEQ ID NO: 39; the CDR1, CDR2, and CDR3 regions of SEQ ID NO: 43; or the CDR1, CDR2, and CDR3 regions of SEQ ID NO: 45. In some embodiments, the light chain variable domain comprises the CDR1, CDR2, and CDR3 regions of SEQ ID NO: 4; the CDR1, CDR2, and CDR3 regions of SEQ ID NO: 8; the CDR1, CDR2, and CDR3 regions of SEQ ID NO: 10; the CDR1, CDR2, and CDR3 regions of SEQ ID NO: 12; or the CDR1, CDR2, and CDR3 regions of SEQ ID NO: 18. In some embodiments, the light chain variable domain comprises the CDR1, CDR2, and CDR3 regions of SEQ ID NO: 20; the CDR1, CDR2, and CDR3 regions of SEQ ID NO: 22; the CDR1, CDR2, and CDR3 regions of SEQ ID NO: 26; the CDR1, CDR2, and CDR3 regions of SEQ ID NO: 30; or the CDR1, CDR2, and CDR3 regions of SEQ ID NO: 32. In some embodiments, the light chain variable domain comprises the CDR1, CDR2, and CDR3 regions of SEQ ID NO: 34; the CDR1, CDR2, and CDR3 regions of SEQ ID NO: 38; the CDR1, CDR2, and CDR3 regions of SEQ ID NO: 40; the CDR1, CDR2, and CDR3 regions of SEQ ID NO: 44; or the CDR1, CDR2, and CDR3 regions of SEQ ID NO: 46.

[0071] In some embodiments, the antibody neutralizes a coronavirus. In some embodiments, the coronavirus is a SARS-CoV-2 virus. In some embodiments, the coronavirus is a SARS-CoV-2 variant strain. In some embodiments, the variant strain is selected from the group consisting of WA1, B.1.1.7, B1.526, B1.351, P1, B1.352, and B.1.427.

[0072] In some embodiments, the antibody specifically binds an epitope on the surface of the coronavirus. In some embodiments, the epitope comprises at least a portion of a coronavirus spike protein. In some embodiments, the at least a portion of a coronavirus spike protein comprises a receptor binding domain (RBD) of a spike protein. In some embodiments, the at least a portion of a coronavirus spike protein comprises a N-Terminal domain (NTD) of a spike protein. In some embodiments, the coronavirus is a SARS-CoV-2 coronavirus. In some embodiments, the composition is administered in combination with a second therapeutic agent.

[0073] In certain aspects, the invention provides a bispecific molecule comprising a first polypeptide chain and a second polypeptide chain, wherein: the first polypeptide chain comprises: a first light chain comprising a variable domain and a constant domain; a first heavy chain comprising a variable domain and a constant domain; the second polypeptide chain comprises: a second light chain comprising a variable domain and a constant domain; and a second heavy chain comprising a variable domain and a constant domain.

[0074] In some embodiments, the first polypeptide chain and the second polypeptide chain are covalently bonded to one another. In some embodiments, the first heavy chain comprises a polypeptide sequence which is at least 60%, 62%, 65%, 67%, 70%, 72%, 75%, 77%, 80%, 82%, 85%, 87%, 90%, 92%, 95%, 97%, 98%, 99% identical to SEQ ID NO: 51, a polypeptide sequence which is at least 60%, 62%, 65%, 67%, 70%, 72%, 75%, 77%, 80%, 82%, 85%, 87%, 90%, 92%, 95%, 97%, 98%, 99% identical to SEQ ID NO: 55, a polypeptide sequence which is at least 60%, 62%, 65%, 67%, 70%, 72%, 75%, 77%, 80%, 82%, 85%, 87%, 90%, 92%, 95%, 97%, 98%, 99% identical to SEQ ID NO: 67, a polypeptide sequence which is at least 60%, 62%, 65%, 67%, 70%, 72%, 75%, 77%, 80%, 82%, 85%, 87%, 90%, 92%, 95%, 97%, 98%, 99% identical to SEQ ID NO: 71, a polypeptide sequence which is at least 60%, 62%, 65%, 67%, 70%, 72%, 75%, 77%, 80%, 82%, 85%, 87%, 90%, 92%, 95%, 97%, 98%, 99% identical to SEQ ID NO: 75, a polypeptide sequence which is at least 60%, 62%, 65%, 67%, 70%, 72%, 75%, 77%, 80%, 82%, 85%, 87%, 90%, 92%, 95%, 97%, 98%, 99% identical to SEQ ID NO: 79, a polypeptide sequence which is at least 60%, 62%, 65%, 67%, 70%, 72%, 75%, 77%, 80%, 82%, 85%, 87%, 90%, 92%, 95%, 97%, 98%, 99% identical to SEQ ID NO: 83, a polypeptide sequence which is at least 60%, 62%, 65%, 67%, 70%, 72%, 75%, 77%, 80%, 82%, 85%, 87%, 90%, 92%, 95%, 97%, 98%, 99% identical to SEQ ID NO: 87, a polypeptide sequence which is at least 60%, 62%, 65%, 67%, 70%, 72%, 75%, 77%, 80%, 82%, 85%, 87%, 90%, 92%, 95%, 97%, 98%, 99% identical to SEQ ID NO: 91, a polypeptide sequence which is at least 60%, 62%, 65%, 67%, 70%, 72%, 75%, 77%, 80%, 82%, 85%, 87%, 90%, 92%, 95%, 97%, 98%, 99% identical to SEQ ID NO: 95, a polypeptide sequence which is at least 60%, 62%, 65%, 67%, 70%, 72%, 75%, 77%, 80%, 82%, 85%, 87%, 90%, 92%, 95%, 97%, 98%, 99% identical to SEQ ID NO: 99, a polypeptide sequence which is at least 60%, 62%, 65%, 67%, 70%, 72%, 75%, 77%, 80%, 82%, 85%, 87%, 90%, 92%, 95%, 97%, 98%, 99% identical to SEQ ID NO: 103, a polypeptide sequence which is at least 60%, 62%, 65%, 67%, 70%, 72%, 75%, 77%, 80%, 82%, 85%, 87%, 90%, 92%, 95%, 97%, 98%, 99% identical to SEQ ID NO: 107, a polypeptide sequence which is at least 60%, 62%, 65%, 67%, 70%, 72%, 75%, 77%, 80%, 82%, 85%, 87%, 90%, 92%, 95%, 97%, 98%, 99% identical to SEQ ID NO: 115, a polypeptide sequence which is at least 60%, 62%, 65%, 67%, 70%, 72%, 75%, 77%, 80%, 82%, 85%, 87%, 90%, 92%, 95%, 97%, 98%, 99% identical to SEQ ID NO: 119, a polypeptide sequence which is at least 60%, 62%, 65%, 67%, 70%, 72%, 75%, 77%, 80%, 82%, 85%, 87%, 90%, 92%, 95%, 97%, 98%, 99% identical to SEQ ID NO: 123, a polypeptide sequence which is at least 60%, 62%, 65%, 67%, 70%, 72%, 75%, 77%, 80%, 82%, 85%, 87%, 90%, 92%, 95%, 97%, 98%, 99% identical to SEQ ID NO: 127, a polypeptide sequence which is at least 60%, 62%, 65%, 67%, 70%, 72%, 75%, 77%, 80%, 82%, 85%, 87%, 90%, 92%, 95%, 97%, 98%, 99% identical to SEQ ID NO: 131, a polypeptide sequence which is at least 60%, 62%, 65%, 67%, 70%, 72%, 75%, 77%, 80%, 82%, 85%, 87%, 90%, 92%, 95%, 97%, 98%, 99% identical to SEQ ID NO: 139, a polypeptide sequence which is at least 60%, 62%, 65%, 67%, 70%, 72%, 75%, 77%, 80%, 82%, 85%, 87%, 90%, 92%, 95%, 97%, 98%, 99% identical to SEQ ID NO: 143, a polypeptide sequence which is at least 60%, 62%, 65%, 67%, 70%, 72%, 75%, 77%, 80%, 82%, 85%, 87%, 90%, 92%, 95%, 97%, 98%, 99% identical to SEQ ID NO: 147, a polypeptide sequence which is at least 60%, 62%, 65%, 67%, 70%, 72%, 75%, 77%, 80%, 82%, 85%, 87%, 90%, 92%, 95%, 97%, 98%, 99% identical to SEQ ID NO: 151, a polypeptide sequence which is at least 60%, 62%, 65%, 67%, 70%, 72%, 75%, 77%, 80%, 82%, 85%, 87%, 90%, 92%, 95%, 97%, 98%, 99% identical to SEQ ID NO: 155, a polypeptide sequence which is at least 60%, 62%, 65%, 67%, 70%, 72%, 75%, 77%, 80%, 82%, 85%, 87%, 90%, 92%, 95%, 97%, 98%, 99% identical to SEQ ID NO: 159, a polypeptide sequence which is at least 60%, 62%, 65%, 67%, 70%, 72%, 75%, 77%, 80%, 82%, 85%, 87%, 90%, 92%, 95%, 97%, 98%, 99% identical to SEQ ID NO: 163, a polypeptide sequence which is at least 60%, 62%, 65%, 67%, 70%, 72%, 75%, 77%, 80%, 82%, 85%, 87%, 90%, 92%, 95%, 97%, 98%, 99% identical to SEQ ID NO: 167, a polypeptide sequence which is at least 60%, 62%, 65%, 67%, 70%, 72%, 75%, 77%, 80%, 82%, 85%, 87%, 90%, 92%, 95%, 97%, 98%, 99% identical to SEQ ID NO: 171, a polypeptide sequence which is at least 60%, 62%, 65%, 67%, 70%, 72%, 75%, 77%, 80%, 82%, 85%, 87%, 90%, 92%, 95%, 97%, 98%, 99% identical to SEQ ID NO: 175, a polypeptide sequence which is at least 60%, 62%, 65%, 67%, 70%, 72%, 75%, 77%, 80%, 82%, 85%, 87%, 90%, 92%, 95%, 97%, 98%, 99% identical to SEQ ID NO: 179, or a polypeptide sequence which is at least 60%, 62%, 65%, 67%, 70%, 72%, 75%, 77%, 80%, 82%, 85%, 87%, 90%, 92%, 95%, 97%, 98%, 99% identical to SEQ ID NO:183.

[0075] In some embodiments, the first light chain comprises a polypeptide sequence which is at least 60%, 62%, 65%, 67%, 70%, 72%, 75%, 77%, 80%, 82%, 85%, 87%, 90%, 92%, 95%, 97%, 98%, 99% identical to SEQ ID NO: 52, a polypeptide sequence which is at least 60%, 62%, 65%, 67%, 70%, 72%, 75%, 77%, 80%, 82%, 85%, 87%, 90%, 92%, 95%, 97%, 98%, 99% identical to SEQ ID NO: 56, a polypeptide sequence which is at least 60%, 62%, 65%, 67%, 70%, 72%, 75%, 77%, 80%, 82%, 85%, 87%, 90%, 92%, 95%, 97%, 98%, 99% identical to SEQ ID NO: 68; a polypeptide sequence which is at least 60%, 62%, 65%, 67%, 70%, 72%, 75%, 77%, 80%, 82%, 85%, 87%, 90%, 92%, 95%, 97%, 98%, 99% identical to SEQ ID NO: 72, a polypeptide sequence which is at least 60%, 62%, 65%, 67%, 70%, 72%, 75%, 77%, 80%, 82%, 85%, 87%, 90%, 92%, 95%, 97%, 98%, 99% identical to SEQ ID NO: 76, a polypeptide sequence which is at least 60%, 62%, 65%, 67%, 70%, 72%, 75%, 77%, 80%, 82%, 85%, 87%, 90%, 92%, 95%, 97%, 98%, 99% identical to SEQ ID NO: 80, a polypeptide sequence which is at least 60%, 62%, 65%, 67%, 70%, 72%, 75%, 77%, 80%, 82%, 85%, 87%, 90%, 92%, 95%, 97%, 98%, 99% identical to SEQ ID NO: 84, a polypeptide sequence which is at least 60%, 62%, 65%, 67%, 70%, 72%, 75%, 77%, 80%, 82%, 85%, 87%, 90%, 92%, 95%, 97%, 98%, 99% identical to SEQ ID NO: 88, a polypeptide sequence which is at least 60%, 62%, 65%, 67%, 70%, 72%, 75%, 77%, 80%, 82%, 85%, 87%, 90%, 92%, 95%, 97%, 98%, 99% identical to SEQ ID NO: 92, a polypeptide sequence which is at least 60%, 62%, 65%, 67%, 70%, 72%, 75%, 77%, 80%, 82%, 85%, 87%, 90%, 92%, 95%, 97%, 98%, 99% identical to SEQ ID NO: 96, a polypeptide sequence which is at least 60%, 62%, 65%, 67%, 70%, 72%, 75%, 77%, 80%, 82%, 85%, 87%, 90%, 92%, 95%, 97%, 98%, 99% identical to SEQ ID NO: 100, a polypeptide sequence which is at least 60%, 62%, 65%, 67%, 70%, 72%, 75%, 77%, 80%, 82%, 85%, 87%, 90%, 92%, 95%, 97%, 98%, 99% identical to SEQ ID NO: 104, a polypeptide sequence which is at least 60%, 62%, 65%, 67%, 70%, 72%, 75%, 77%, 80%, 82%, 85%, 87%, 90%, 92%, 95%, 97%, 98%, 99% identical to SEQ ID NO: 108, a polypeptide sequence which is at least 60%, 62%, 65%, 67%, 70%, 72%, 75%, 77%, 80%, 82%, 85%, 87%, 90%, 92%, 95%, 97%, 98%, 99% identical to SEQ ID NO: 116, a polypeptide sequence which is at least 60%, 62%, 65%, 67%, 70%, 72%, 75%, 77%, 80%, 82%, 85%, 87%, 90%, 92%, 95%, 97%, 98%, 99% identical to SEQ ID NO: 120, a polypeptide sequence which is at least 60%, 62%, 65%, 67%, 70%, 72%, 75%, 77%, 80%, 82%, 85%, 87%, 90%, 92%, 95%, 97%, 98%, 99% identical to SEQ ID NO: 124, a polypeptide sequence which is at least 60%, 62%, 65%, 67%, 70%, 72%, 75%, 77%, 80%, 82%, 85%, 87%, 90%, 92%, 95%, 97%, 98%, 99% identical to SEQ ID NO: 128, a polypeptide sequence which is at least 60%, 62%, 65%, 67%, 70%, 72%, 75%, 77%, 80%, 82%, 85%, 87%, 90%, 92%, 95%, 97%, 98%, 99% identical to SEQ ID NO: 132, a polypeptide sequence which is at least 60%, 62%, 65%, 67%, 70%, 72%, 75%, 77%, 80%, 82%, 85%, 87%, 90%, 92%, 95%, 97%, 98%, 99% identical to SEQ ID NO: 140, a polypeptide sequence which is at least 60%, 62%, 65%, 67%, 70%, 72%, 75%, 77%, 80%, 82%, 85%, 87%, 90%, 92%, 95%, 97%, 98%, 99% identical to SEQ ID NO: 144, a polypeptide sequence which is at least 60%, 62%, 65%, 67%, 70%, 72%, 75%, 77%, 80%, 82%, 85%, 87%, 90%, 92%, 95%, 97%, 98%, 99% identical to SEQ ID NO: 148, a polypeptide sequence which is at least 60%, 62%, 65%, 67%, 70%, 72%, 75%, 77%, 80%, 82%, 85%, 87%, 90%, 92%, 95%, 97%, 98%, 99% identical to SEQ ID NO: 152, a polypeptide sequence which is at least 60%, 62%, 65%, 67%, 70%, 72%, 75%, 77%, 80%, 82%, 85%, 87%, 90%, 92%, 95%, 97%, 98%, 99% identical to SEQ ID NO: 156, a polypeptide sequence which is at least 60%, 62%, 65%, 67%, 70%, 72%, 75%, 77%, 80%, 82%, 85%, 87%, 90%, 92%, 95%, 97%, 98%, 99% identical to SEQ ID NO: 160, a polypeptide sequence which is at least 60%, 62%, 65%, 67%, 70%, 72%, 75%, 77%, 80%, 82%, 85%, 87%, 90%, 92%, 95%, 97%, 98%, 99% identical to SEQ ID NO: 164, a polypeptide sequence which is at least 60%, 62%, 65%, 67%, 70%, 72%, 75%, 77%, 80%, 82%, 85%, 87%, 90%, 92%, 95%, 97%, 98%, 99% identical to SEQ ID NO: 168, a polypeptide sequence which is at least 60%, 62%, 65%, 67%, 70%, 72%, 75%, 77%, 80%, 82%, 85%, 87%, 90%, 92%, 95%, 97%, 98%, 99% identical to SEQ ID NO: 172, a polypeptide sequence which is at least 60%, 62%, 65%, 67%, 70%, 72%, 75%, 77%, 80%, 82%, 85%, 87%, 90%, 92%, 95%, 97%, 98%, 99% identical to SEQ ID NO: 176, a polypeptide sequence which is at least 60%, 62%, 65%, 67%, 70%, 72%, 75%, 77%, 80%, 82%, 85%, 87%, 90%, 92%, 95%, 97%, 98%, 99% identical to SEQ ID NO: 180, or a polypeptide sequence which is at least 60%, 62%, 65%, 67%, 70%, 72%, 75%, 77%, 80%, 82%, 85%, 87%, 90%, 92%, 95%, 97%, 98%, 99% identical to SEQ ID NO:184.

[0076] In some embodiments, the second heavy chain comprises a polypeptide sequence which is at least 60%, 62%, 65%, 67%, 70%, 72%, 75%, 77%, 80%, 82%, 85%, 87%, 90%, 92%, 95%, 97%, 98%, 99% identical to SEQ ID NO: 53, a polypeptide sequence which is at least 60%, 62%, 65%, 67%, 70%, 72%, 75%, 77%, 80%, 82%, 85%, 87%, 90%, 92%, 95%, 97%, 98%, 99% identical to SEQ ID NO: 57, a polypeptide sequence which is at least 60%, 62%, 65%, 67%, 70%, 72%, 75%, 77%, 80%, 82%, 85%, 87%, 90%, 92%, 95%, 97%, 98%, 99% identical to SEQ ID NO: 69, a polypeptide sequence which is at least 60%, 62%, 65%, 67%, 70%, 72%, 75%, 77%, 80%, 82%, 85%, 87%, 90%, 92%, 95%, 97%, 98%, 99% identical to SEQ ID NO: 73, a polypeptide sequence which is at least 60%, 62%, 65%, 67%, 70%, 72%, 75%, 77%, 80%, 82%, 85%, 87%, 90%, 92%, 95%, 97%, 98%, 99% identical to SEQ ID NO: 77, a polypeptide sequence which is at least 60%, 62%, 65%, 67%, 70%, 72%, 75%, 77%, 80%, 82%, 85%, 87%, 90%, 92%, 95%, 97%, 98%, 99% identical to SEQ ID NO: 81, a polypeptide sequence which is at least 60%, 62%, 65%, 67%, 70%, 72%, 75%, 77%, 80%, 82%, 85%, 87%, 90%, 92%, 95%, 97%, 98%, 99% identical to SEQ ID NO: 85, a polypeptide sequence which is at least 60%, 62%, 65%, 67%, 70%, 72%, 75%, 77%, 80%, 82%, 85%, 87%, 90%, 92%, 95%, 97%, 98%, 99% identical to SEQ ID NO: 89, a polypeptide sequence which is at least 60%, 62%, 65%, 67%, 70%, 72%, 75%, 77%, 80%, 82%, 85%, 87%, 90%, 92%, 95%, 97%, 98%, 99% identical to SEQ ID NO: 93, a polypeptide sequence which is at least 60%, 62%, 65%, 67%, 70%, 72%, 75%, 77%, 80%, 82%, 85%, 87%, 90%, 92%, 95%, 97%, 98%, 99% identical to SEQ ID NO: 97, a polypeptide sequence which is at least 60%, 62%, 65%, 67%, 70%, 72%, 75%, 77%, 80%, 82%, 85%, 87%, 90%, 92%, 95%, 97%, 98%, 99% identical to SEQ ID NO: 101, a polypeptide sequence which is at least 60%, 62%, 65%, 67%, 70%, 72%, 75%, 77%, 80%, 82%, 85%, 87%, 90%, 92%, 95%, 97%, 98%, 99% identical to SEQ ID NO: 105, a polypeptide sequence which is at least 60%, 62%, 65%, 67%, 70%, 72%, 75%, 77%, 80%, 82%, 85%, 87%, 90%, 92%, 95%, 97%, 98%, 99% identical to SEQ ID NO: 109, a polypeptide sequence which is at least 60%, 62%, 65%, 67%, 70%, 72%, 75%, 77%, 80%, 82%, 85%, 87%, 90%, 92%, 95%, 97%, 98%, 99% identical to SEQ ID NO: 117, a polypeptide sequence which is at least 60%, 62%, 65%, 67%, 70%, 72%, 75%, 77%, 80%, 82%, 85%, 87%, 90%, 92%, 95%, 97%, 98%, 99% identical to SEQ ID NO: 121, a polypeptide sequence which is at least 60%, 62%, 65%, 67%, 70%, 72%, 75%, 77%, 80%, 82%, 85%, 87%, 90%, 92%, 95%, 97%, 98%, 99% identical to SEQ ID NO: 125, a polypeptide sequence which is at least 60%, 62%, 65%, 67%, 70%, 72%, 75%, 77%, 80%, 82%, 85%, 87%, 90%, 92%, 95%, 97%, 98%, 99% identical to SEQ ID NO: 129, a polypeptide sequence which is at least 60%, 62%, 65%, 67%, 70%, 72%, 75%, 77%, 80%, 82%, 85%, 87%, 90%, 92%, 95%, 97%, 98%, 99% identical to SEQ ID NO: 133, a polypeptide sequence which is at least 60%, 62%, 65%, 67%, 70%, 72%, 75%, 77%, 80%, 82%, 85%, 87%, 90%, 92%, 95%, 97%, 98%, 99% identical to SEQ ID NO: 141, a polypeptide sequence which is at least 60%, 62%, 65%, 67%, 70%, 72%, 75%, 77%, 80%, 82%, 85%, 87%, 90%, 92%, 95%, 97%, 98%, 99% identical to SEQ ID NO: 145, a polypeptide sequence which is at least 60%, 62%, 65%, 67%, 70%, 72%, 75%, 77%, 80%, 82%, 85%, 87%, 90%, 92%, 95%, 97%, 98%, 99% identical to SEQ ID NO: 149, a polypeptide sequence which is at least 60%, 62%, 65%, 67%, 70%, 72%, 75%, 77%, 80%, 82%, 85%, 87%, 90%, 92%, 95%, 97%, 98%, 99% identical to SEQ ID NO: 153, a polypeptide sequence which is at least 60%, 62%, 65%, 67%, 70%, 72%, 75%, 77%, 80%, 82%, 85%, 87%, 90%, 92%, 95%, 97%, 98%, 99% identical to SEQ ID NO: 157, a polypeptide sequence which is at least 60%, 62%, 65%, 67%, 70%, 72%, 75%, 77%, 80%, 82%, 85%, 87%, 90%, 92%, 95%, 97%, 98%, 99% identical to SEQ ID NO: 161, a polypeptide sequence which is at least 60%, 62%, 65%, 67%, 70%, 72%, 75%, 77%, 80%, 82%, 85%, 87%, 90%, 92%, 95%, 97%, 98%, 99% identical to SEQ ID NO: 165, a polypeptide sequence which is at least 60%, 62%, 65%, 67%, 70%, 72%, 75%, 77%, 80%, 82%, 85%, 87%, 90%, 92%, 95%, 97%, 98%, 99% identical to SEQ ID NO: 169, a polypeptide sequence which is at least 60%, 62%, 65%, 67%, 70%, 72%, 75%, 77%, 80%, 82%, 85%, 87%, 90%, 92%, 95%, 97%, 98%, 99% identical to SEQ ID NO: 173, a polypeptide sequence which is at least 60%, 62%, 65%, 67%, 70%, 72%, 75%, 77%, 80%, 82%, 85%, 87%, 90%, 92%, 95%, 97%, 98%, 99% identical to SEQ ID NO: 177, a polypeptide sequence which is at least 60%, 62%, 65%, 67%, 70%, 72%, 75%, 77%, 80%, 82%, 85%, 87%, 90%, 92%, 95%, 97%, 98%, 99% identical to SEQ ID NO: 181, or a polypeptide sequence which is at least 60%, 62%, 65%, 67%, 70%, 72%, 75%, 77%, 80%, 82%, 85%, 87%, 90%, 92%, 95%, 97%, 98%, 99% identical to SEQ ID NO: 185.

[0077] In some embodiments, the second light chain comprises a polypeptide sequence which is at least 60%, 62%, 65%, 67%, 70%, 72%, 75%, 77%, 80%, 82%, 85%, 87%, 90%, 92%, 95%, 97%, 98%, 99% identical to SEQ ID NO: 54, a polypeptide sequence which is at least 60%, 62%, 65%, 67%, 70%, 72%, 75%, 77%, 80%, 82%, 85%, 87%, 90%, 92%, 95%, 97%, 98%, 99% identical to SEQ ID NO: 58, a polypeptide sequence which is at least 60%, 62%, 65%, 67%, 70%, 72%, 75%, 77%, 80%, 82%, 85%, 87%, 90%, 92%, 95%, 97%, 98%, 99% identical to SEQ ID NO: 70, a polypeptide sequence which is at least 60%, 62%, 65%, 67%, 70%, 72%, 75%, 77%, 80%, 82%, 85%, 87%, 90%, 92%, 95%, 97%, 98%, 99% identical to SEQ ID NO: 74, a polypeptide sequence which is at least 60%, 62%, 65%, 67%, 70%, 72%, 75%, 77%, 80%, 82%, 85%, 87%, 90%, 92%, 95%, 97%, 98%, 99% identical to SEQ ID NO: 78, a polypeptide sequence which is at least 60%, 62%, 65%, 67%, 70%, 72%, 75%, 77%, 80%, 82%, 85%, 87%, 90%, 92%, 95%, 97%, 98%, 99% identical to SEQ ID NO: 82, a polypeptide sequence which is at least 60%, 62%, 65%, 67%, 70%, 72%, 75%, 77%, 80%, 82%, 85%, 87%, 90%, 92%, 95%, 97%, 98%, 99% identical to SEQ ID NO: 86, a polypeptide sequence which is at least 60%, 62%, 65%, 67%, 70%, 72%, 75%, 77%, 80%, 82%, 85%, 87%, 90%, 92%, 95%, 97%, 98%, 99% identical to SEQ ID NO: 90, a polypeptide sequence which is at least 60%, 62%, 65%, 67%, 70%, 72%, 75%, 77%, 80%, 82%, 85%, 87%, 90%, 92%, 95%, 97%, 98%, 99% identical to SEQ ID NO: 94, a polypeptide sequence which is at least 60%, 62%, 65%, 67%, 70%, 72%, 75%, 77%, 80%, 82%, 85%, 87%, 90%, 92%, 95%, 97%, 98%, 99% identical to SEQ ID NO: 98, a polypeptide sequence which is at least 60%, 62%, 65%, 67%, 70%, 72%, 75%, 77%, 80%, 82%, 85%, 87%, 90%, 92%, 95%, 97%, 98%, 99% identical to SEQ ID NO: 102, a polypeptide sequence which is at least 60%, 62%, 65%, 67%, 70%, 72%, 75%, 77%, 80%, 82%, 85%, 87%, 90%, 92%, 95%, 97%, 98%, 99% identical to SEQ ID NO: 106, a polypeptide sequence which is at least 60%, 62%, 65%, 67%, 70%, 72%, 75%, 77%, 80%, 82%, 85%, 87%, 90%, 92%, 95%, 97%, 98%, 99% identical to SEQ ID NO: 110, a polypeptide sequence which is at least 60%, 62%, 65%, 67%, 70%, 72%, 75%, 77%, 80%, 82%, 85%, 87%, 90%, 92%, 95%, 97%, 98%, 99% identical to SEQ ID NO: 118, a polypeptide sequence which is at least 60%, 62%, 65%, 67%, 70%, 72%, 75%, 77%, 80%, 82%, 85%, 87%, 90%, 92%, 95%, 97%, 98%, 99% identical to SEQ ID NO: 122, a polypeptide sequence which is at least 60%, 62%, 65%, 67%, 70%, 72%, 75%, 77%, 80%, 82%, 85%, 87%, 90%, 92%, 95%, 97%, 98%, 99% identical to SEQ ID NO: 126, a polypeptide sequence which is at least 60%, 62%, 65%, 67%, 70%, 72%, 75%, 77%, 80%, 82%, 85%, 87%, 90%, 92%, 95%, 97%, 98%, 99% identical to SEQ ID NO: 130, a polypeptide sequence which is at least 60%, 62%, 65%, 67%, 70%, 72%, 75%, 77%, 80%, 82%, 85%, 87%, 90%, 92%, 95%, 97%, 98%, 99% identical to SEQ ID NO: 134, a polypeptide sequence which is at least 60%, 62%, 65%, 67%, 70%, 72%, 75%, 77%, 80%, 82%, 85%, 87%, 90%, 92%, 95%, 97%, 98%, 99% identical to SEQ ID NO: 142, a polypeptide sequence which is at least 60%, 62%, 65%, 67%, 70%, 72%, 75%, 77%, 80%, 82%, 85%, 87%, 90%, 92%, 95%, 97%, 98%, 99% identical to SEQ ID NO: 146, a polypeptide sequence which is at least 60%, 62%, 65%, 67%, 70%, 72%, 75%, 77%, 80%, 82%, 85%, 87%, 90%, 92%, 95%, 97%, 98%, 99% identical to SEQ ID NO: 150, a polypeptide sequence which is at least 60%, 62%, 65%, 67%, 70%, 72%, 75%, 77%, 80%, 82%, 85%, 87%, 90%, 92%, 95%, 97%, 98%, 99% identical to SEQ ID NO: 154, a polypeptide sequence which is at least 60%, 62%, 65%, 67%, 70%, 72%, 75%, 77%, 80%, 82%, 85%, 87%, 90%, 92%, 95%, 97%, 98%, 99% identical to SEQ ID NO: 158, a polypeptide sequence which is at least 60%, 62%, 65%, 67%, 70%, 72%, 75%, 77%, 80%, 82%, 85%, 87%, 90%, 92%, 95%, 97%, 98%, 99% identical to SEQ ID NO: 162, a polypeptide sequence which is at least 60%, 62%, 65%, 67%, 70%, 72%, 75%, 77%, 80%, 82%, 85%, 87%, 90%, 92%, 95%, 97%, 98%, 99% identical to SEQ ID NO: 166, a polypeptide sequence which is at least 60%, 62%, 65%, 67%, 70%, 72%, 75%, 77%, 80%, 82%, 85%, 87%, 90%, 92%, 95%, 97%, 98%, 99% identical to SEQ ID NO: 170, a polypeptide sequence which is at least 60%, 62%, 65%, 67%, 70%, 72%, 75%, 77%, 80%, 82%, 85%, 87%, 90%, 92%, 95%, 97%, 98%, 99% identical to SEQ ID NO: 174, a polypeptide sequence which is at least 60%, 62%, 65%, 67%, 70%, 72%, 75%, 77%, 80%, 82%, 85%, 87%, 90%, 92%, 95%, 97%, 98%, 99% identical to SEQ ID NO: 178, a polypeptide sequence which is at least 60%, 62%, 65%, 67%, 70%, 72%, 75%, 77%, 80%, 82%, 85%, 87%, 90%, 92%, 95%, 97%, 98%, 99% identical to SEQ ID NO: 182, or a polypeptide sequence which is at least 60%, 62%, 65%, 67%, 70%, 72%, 75%, 77%, 80%, 82%, 85%, 87%, 90%, 92%, 95%, 97%, 98%, 99% identical to SEQ ID NO: 186.

[0078] In some embodiments, variable domain of the first heavy chain comprises a polypeptide sequence which is at least 60%, 62%, 65%, 67%, 70%, 72%, 75%, 77%, 80%, 82%, 85%, 87%, 90%, 92%, 95%, 97%, 98%, 99% identical to SEQ ID NO: 15, a polypeptide sequence which is at least 60%, 62%, 65%, 67%, 70%, 72%, 75%, 77%, 80%, 82%, 85%, 87%, 90%, 92%, 95%, 97%, 98%, 99% identical to SEQ ID NO: 27, a polypeptide sequence which is at least 60%, 62%, 65%, 67%, 70%, 72%, 75%, 77%, 80%, 82%, 85%, 87%, 90%, 92%, 95%, 97%, 98%, 99% identical to SEQ ID NO: 35, a polypeptide sequence which is at least 60%, 62%, 65%, 67%, 70%, 72%, 75%, 77%, 80%, 82%, 85%, 87%, 90%, 92%, 95%, 97%, 98%, 99% identical to SEQ ID NO: 25, a polypeptide sequence which is at least 60%, 62%, 65%, 67%, 70%, 72%, 75%, 77%, 80%, 82%, 85%, 87%, 90%, 92%, 95%, 97%, 98%, 99% identical to SEQ ID NO: 17, a polypeptide sequence which is at least 60%, 62%, 65%, 67%, 70%, 72%, 75%, 77%, 80%, 82%, 85%, 87%, 90%, 92%, 95%, 97%, 98%, 99% identical to SEQ ID NO: 37, a polypeptide sequence which is at least 60%, 62%, 65%, 67%, 70%, 72%, 75%, 77%, 80%, 82%, 85%, 87%, 90%, 92%, 95%, 97%, 98%, 99% identical to SEQ ID NO: 19, a polypeptide sequence which is at least 60%, 62%, 65%, 67%, 70%, 72%, 75%, 77%, 80%, 82%, 85%, 87%, 90%, 92%, 95%, 97%, 98%, 99% identical to SEQ ID NO: 13, a polypeptide sequence which is at least 60%, 62%, 65%, 67%, 70%, 72%, 75%, 77%, 80%, 82%, 85%, 87%, 90%, 92%, 95%, 97%, 98%, 99% identical to SEQ ID NO: 5, a polypeptide sequence which is at least 60%, 62%, 65%, 67%, 70%, 72%, 75%, 77%, 80%, 82%, 85%, 87%, 90%, 92%, 95%, 97%, 98%, 99% identical to SEQ ID NO: 21, or a polypeptide sequence which is at least 60%, 62%, 65%, 67%, 70%, 72%, 75%, 77%, 80%, 82%, 85%, 87%, 90%, 92%, 95%, 97%, 98%, 99% identical to SEQ ID NO: 41.

[0079] In some embodiments, variable domain of the first light chain comprises a polypeptide sequence which is at least 60%, 62%, 65%, 67%, 70%, 72%, 75%, 77%, 80%, 82%, 85%, 87%, 90%, 92%, 95%, 97%, 98%, 99% identical to SEQ ID NO: 16, a polypeptide sequence which is at least 60%, 62%, 65%, 67%, 70%, 72%, 75%, 77%, 80%, 82%, 85%, 87%, 90%, 92%, 95%, 97%, 98%, 99% identical to SEQ ID NO: 28, a polypeptide sequence which is at least 60%, 62%, 65%, 67%, 70%, 72%, 75%, 77%, 80%, 82%, 85%, 87%, 90%, 92%, 95%, 97%, 98%, 99% identical to SEQ ID NO: 36, a polypeptide sequence which is at least 60%, 62%, 65%, 67%, 70%, 72%, 75%, 77%, 80%, 82%, 85%, 87%, 90%, 92%, 95%, 97%, 98%, 99% identical to SEQ ID NO: 26, a polypeptide sequence which is at least 60%, 62%, 65%, 67%, 70%, 72%, 75%, 77%, 80%, 82%, 85%, 87%, 90%, 92%, 95%, 97%, 98%, 99% identical to SEQ ID NO: 18, a polypeptide sequence which is at least 60%, 62%, 65%, 67%, 70%, 72%, 75%, 77%, 80%, 82%, 85%, 87%, 90%, 92%, 95%, 97%, 98%, 99% identical to SEQ ID NO: 38, a polypeptide sequence which is at least 60%, 62%, 65%, 67%, 70%, 72%, 75%, 77%, 80%, 82%, 85%, 87%, 90%, 92%, 95%, 97%, 98%, 99% identical to SEQ ID NO: 20, a polypeptide sequence which is at least 60%, 62%, 65%, 67%, 70%, 72%, 75%, 77%, 80%, 82%, 85%, 87%, 90%, 92%, 95%, 97%, 98%, 99% identical to SEQ ID NO: 14, a polypeptide sequence which is at least 60%, 62%, 65%, 67%, 70%, 72%, 75%, 77%, 80%, 82%, 85%, 87%, 90%, 92%, 95%, 97%, 98%, 99% identical to SEQ ID NO: 6, a polypeptide sequence which is at least 60%, 62%, 65%, 67%, 70%, 72%, 75%, 77%, 80%, 82%, 85%, 87%, 90%, 92%, 95%, 97%, 98%, 99% identical to SEQ ID NO: 22, or a polypeptide sequence which is at least 60%, 62%, 65%, 67%, 70%, 72%, 75%, 77%, 80%, 82%, 85%, 87%, 90%, 92%, 95%, 97%, 98%, 99% identical to SEQ ID NO: 42.

[0080] In some embodiments, variable domain of the second heavy chain comprises a polypeptide sequence which is at least 60%, 62%, 65%, 67%, 70%, 72%, 75%, 77%, 80%, 82%, 85%, 87%, 90%, 92%, 95%, 97%, 98%, 99% identical to SEQ ID NO: 27, a polypeptide sequence which is at least 60%, 62%, 65%, 67%, 70%, 72%, 75%, 77%, 80%, 82%, 85%, 87%, 90%, 92%, 95%, 97%, 98%, 99% identical to SEQ ID NO: 15, a polypeptide sequence which is at least 60%, 62%, 65%, 67%, 70%, 72%, 75%, 77%, 80%, 82%, 85%, 87%, 90%, 92%, 95%, 97%, 98%, 99% identical to SEQ ID NO: 5, a polypeptide sequence which is at least 60%, 62%, 65%, 67%, 70%, 72%, 75%, 77%, 80%, 82%, 85%, 87%, 90%, 92%, 95%, 97%, 98%, 99% identical to SEQ ID NO: 19, a polypeptide sequence which is at least 60%, 62%, 65%, 67%, 70%, 72%, 75%, 77%, 80%, 82%, 85%, 87%, 90%, 92%, 95%, 97%, 98%, 99% identical to SEQ ID NO: 21, a polypeptide sequence which is at least 60%, 62%, 65%, 67%, 70%, 72%, 75%, 77%, 80%, 82%, 85%, 87%, 90%, 92%, 95%, 97%, 98%, 99% identical to SEQ ID NO: 15, a polypeptide sequence which is at least 60%, 62%, 65%, 67%, 70%, 72%, 75%, 77%, 80%, 82%, 85%, 87%, 90%, 92%, 95%, 97%, 98%, 99% identical to SEQ ID NO: 29, a polypeptide sequence which is at least 60%, 62%, 65%, 67%, 70%, 72%, 75%, 77%, 80%, 82%, 85%, 87%, 90%, 92%, 95%, 97%, 98%, 99% identical to SEQ ID NO: 35, a polypeptide sequence which is at least 60%, 62%, 65%, 67%, 70%, 72%, 75%, 77%, 80%, 82%, 85%, 87%, 90%, 92%, 95%, 97%, 98%, 99% identical to SEQ ID NO: 23, a polypeptide sequence which is at least 60%, 62%, 65%, 67%, 70%, 72%, 75%, 77%, 80%, 82%, 85%, 87%, 90%, 92%, 95%, 97%, 98%, 99% identical to SEQ ID NO: 25, a polypeptide sequence which is at least 60%, 62%, 65%, 67%, 70%, 72%, 75%, 77%, 80%, 82%, 85%, 87%, 90%, 92%, 95%, 97%, 98%, 99% identical to SEQ ID NO: 37, a polypeptide sequence which is at least 60%, 62%, 65%, 67%, 70%, 72%, 75%, 77%, 80%, 82%, 85%, 87%, 90%, 92%, 95%, 97%, 98%, 99% identical to SEQ ID NO: 39, a polypeptide sequence which is at least 60%, 62%, 65%, 67%, 70%, 72%, 75%, 77%, 80%, 82%, 85%, 87%, 90%, 92%, 95%, 97%, 98%, 99% identical to SEQ ID NO: 43, or a polypeptide sequence which is at least 60%, 62%, 65%, 67%, 70%, 72%, 75%, 77%, 80%, 82%, 85%, 87%, 90%, 92%, 95%, 97%, 98%, 99% identical to SEQ ID NO: 9.

[0081] In some embodiments, variable domain of the second light chain comprises a polypeptide sequence which is at least 60%, 62%, 65%, 67%, 70%, 72%, 75%, 77%, 80%, 82%, 85%, 87%, 90%, 92%, 95%, 97%, 98%, 99% identical to SEQ ID NO: 28, a polypeptide sequence which is at least 60%, 62%, 65%, 67%, 70%, 72%, 75%, 77%, 80%, 82%, 85%, 87%, 90%, 92%, 95%, 97%, 98%, 99% identical to SEQ ID NO: 16, a polypeptide sequence which is at least 60%, 62%, 65%, 67%, 70%, 72%, 75%, 77%, 80%, 82%, 85%, 87%, 90%, 92%, 95%, 97%, 98%, 99% identical to SEQ ID NO: 6, a polypeptide sequence which is at least 60%, 62%, 65%, 67%, 70%, 72%, 75%, 77%, 80%, 82%, 85%, 87%, 90%, 92%, 95%, 97%, 98%, 99% identical to SEQ ID NO: 20, a polypeptide sequence which is at least 60%, 62%, 65%, 67%, 70%, 72%, 75%, 77%, 80%, 82%, 85%, 87%, 90%, 92%, 95%, 97%, 98%, 99% identical to SEQ ID NO: 22, a polypeptide sequence which is at least 60%, 62%, 65%, 67%, 70%, 72%, 75%, 77%, 80%, 82%, 85%, 87%, 90%, 92%, 95%, 97%, 98%, 99% identical to SEQ ID NO: 16, a polypeptide sequence which is at least 60%, 62%, 65%, 67%, 70%, 72%, 75%, 77%, 80%, 82%, 85%, 87%, 90%, 92%, 95%, 97%, 98%, 99% identical to SEQ ID NO: 30, a polypeptide sequence which is at least 60%, 62%, 65%, 67%, 70%, 72%, 75%, 77%, 80%, 82%, 85%, 87%, 90%, 92%, 95%, 97%, 98%, 99% identical to SEQ ID NO: 36, a polypeptide sequence which is at least 60%, 62%, 65%, 67%, 70%, 72%, 75%, 77%, 80%, 82%, 85%, 87%, 90%, 92%, 95%, 97%, 98%, 99% identical to SEQ ID NO: 24, a polypeptide sequence which is at least 60%, 62%, 65%, 67%, 70%, 72%, 75%, 77%, 80%, 82%, 85%, 87%, 90%, 92%, 95%, 97%, 98%, 99% identical to SEQ ID NO: 26, a polypeptide sequence which is at least 60%, 62%, 65%, 67%, 70%, 72%, 75%, 77%, 80%, 82%, 85%, 87%, 90%, 92%, 95%, 97%, 98%, 99% identical to SEQ ID NO: 38, a polypeptide sequence which is at least 60%, 62%, 65%, 67%, 70%, 72%, 75%, 77%, 80%, 82%, 85%, 87%, 90%, 92%, 95%, 97%, 98%, 99% identical to SEQ ID NO: 40, a polypeptide sequence which is at least 60%, 62%, 65%, 67%, 70%, 72%, 75%, 77%, 80%, 82%, 85%, 87%, 90%, 92%, 95%, 97%, 98%, 99% identical to SEQ ID NO: 44, or a polypeptide sequence which is at least 60%, 62%, 65%, 67%, 70%, 72%, 75%, 77%, 80%, 82%, 85%, 87%, 90%, 92%, 95%, 97%, 98%, 99% identical to SEQ ID NO: 10.

[0082] In some embodiments, the variable domain of the first heavy chain comprises the CDR1, CDR2, and CDR3 of SEQ ID NO: 51; the CDR1, CDR2, and CDR3 of SEQ ID NO: 55; the CDR1, CDR2, and CDR3 of SEQ ID NO: 67; the CDR1, CDR2, and CDR3 of SEQ ID NO: 71; the CDR1, CDR2, and CDR3 of SEQ ID NO: 75; the CDR1, CDR2, and CDR3 of SEQ ID NO: 79; the CDR1, CDR2, and CDR3 of SEQ ID NO: 83; the CDR1, CDR2, and CDR3 of SEQ ID NO: 87; the CDR1, CDR2, and CDR3 of SEQ ID NO: 91; the CDR1, CDR2, and CDR3 of SEQ ID NO: 95; the CDR1, CDR2, and CDR3 of SEQ ID NO: 99; the CDR1, CDR2, and CDR3 of SEQ ID NO: 103; the CDR1, CDR2, and CDR3 of SEQ ID NO: 107; the CDR1, CDR2, and CDR3 of SEQ ID NO: 115; the CDR1, CDR2, and CDR3 of SEQ ID NO: 119, the CDR1, CDR2, and CDR3 of SEQ ID NO: 123, the CDR1, CDR2, and CDR3 of SEQ ID NO: 127; the CDR1, CDR2, and CDR3 of SEQ ID NO: 131; the CDR1, CDR2, and CDR3 of SEQ ID NO: 139; the CDR1, CDR2, and CDR3 of SEQ ID NO: 143; the CDR1, CDR2, and CDR3 of SEQ ID NO: 147; the CDR1, CDR2, and CDR3 of SEQ ID NO: 151; the CDR1, CDR2, and CDR3 of SEQ ID NO: 155; the CDR1, CDR2, and CDR3 of SEQ ID NO: 159; the CDR1, CDR2, and CDR3 of SEQ ID NO: 163; the CDR1, CDR2, and CDR3 of SEQ ID NO: 167, the CDR1, CDR2, and CDR3 of SEQ ID NO: 171, the CDR1, CDR2, and CDR3 of SEQ ID NO: 175, the CDR1, CDR2, and CDR3 of SEQ ID NO: 179, or the CDR1, CDR2, and CDR3 of SEQ ID NO: 183.

[0083] In some embodiments, the variable domain of the first light chain comprises the CDR1, CDR2, and CDR3 of SEQ ID NO: 52; the CDR1, CDR2, and CDR3 of SEQ ID NO: 56; the CDR1, CDR2, and CDR3 of SEQ ID NO: 68; the CDR1, CDR2, and CDR3 of SEQ ID NO: 72; the CDR1, CDR2, and CDR3 of SEQ ID NO: 76; the CDR1, CDR2, and CDR3 of SEQ ID NO: 80; the CDR1, CDR2, and CDR3 of SEQ ID NO: 84; the CDR1, CDR2, and CDR3 of SEQ ID NO: 88; the CDR1, CDR2, and CDR3 of SEQ ID NO: 92; the CDR1, CDR2, and CDR3 of SEQ ID NO: 96; the CDR1, CDR2, and CDR3 of SEQ ID NO: 100; the CDR1, CDR2, and CDR3 of SEQ ID NO: 104; the CDR1, CDR2, and CDR3 of SEQ ID NO: 108; the CDR1, CDR2, and CDR3 of SEQ ID NO: 116; the CDR1, CDR2, and CDR3 of SEQ ID NO: 120; the CDR1, CDR2, and CDR3 of SEQ ID NO: 124; the CDR1, CDR2, and CDR3 of SEQ ID NO: 128; the CDR1, CDR2, and CDR3 of SEQ ID NO: 132; the CDR1, CDR2, and CDR3 of SEQ ID NO: 140; the CDR1, CDR2, and CDR3 of SEQ ID NO: 144; the CDR1, CDR2, and CDR3 of SEQ ID NO: 148; the CDR1, CDR2, and CDR3 of SEQ ID NO: 152; the CDR1, CDR2, and CDR3 of SEQ ID NO: 156; the CDR1, CDR2, and CDR3 of SEQ ID NO: 160; the CDR1, CDR2, and CDR3 of SEQ ID NO: 164; the CDR1, CDR2, and CDR3 of SEQ ID NO: 168, the CDR1, CDR2, and CDR3 of SEQ ID NO: 172, the CDR1, CDR2, and CDR3 of SEQ ID NO: 176, the CDR1, CDR2, and CDR3 of SEQ ID NO: 180, or the CDR1, CDR2, and CDR3 of SEQ ID NO: 184.

[0084] In some embodiments, the variable domain of the second heavy chain comprises the CDR1, CDR2, and CDR3 of SEQ ID NO: 53; the CDR1, CDR2, and CDR3 of SEQ ID NO: 57; the CDR1, CDR2, and CDR3 of SEQ ID NO: 69; the CDR1, CDR2, and CDR3 of SEQ ID NO: 73; the CDR1, CDR2, and CDR3 of SEQ ID NO: 77; the CDR1, CDR2, and CDR3 of SEQ ID NO: 81; the CDR1, CDR2, and CDR3 of SEQ ID NO: 85; the CDR1, CDR2, and CDR3 of SEQ ID NO: 89; the CDR1, CDR2, and CDR3 of SEQ ID NO: 93; the CDR1, CDR2, and CDR3 of SEQ ID NO: 97; the CDR1, CDR2, and CDR3 of SEQ ID NO: 101; the CDR1, CDR2, and CDR3 of SEQ ID NO: 105; the CDR1, CDR2, and CDR3 of SEQ ID NO: 109; the CDR1, CDR2, and CDR3 of SEQ ID NO: 117; the CDR1, CDR2, and CDR3 of SEQ ID NO: 121; the CDR1, CDR2, and CDR3 of SEQ ID NO: 125; the CDR1, CDR2, and CDR3 of SEQ ID NO: 129; the CDR1, CDR2, and CDR3 of SEQ ID NO: 133; the CDR1, CDR2, and CDR3 of SEQ ID NO: 141; the CDR1, CDR2, and CDR3 of SEQ ID NO: 145; the CDR1, CDR2, and CDR3 of SEQ ID NO: 149; the CDR1, CDR2, and CDR3 of SEQ ID NO: 153; the CDR1, CDR2, and CDR3 of SEQ ID NO: 157; the CDR1, CDR2, and CDR3 of SEQ ID NO: 161; the CDR1, CDR2, and CDR3 of SEQ ID NO: 165; the CDR1, CDR2, and CDR3 of SEQ ID NO: 169, the CDR1, CDR2, and CDR3 of SEQ ID NO: 173, the CDR1, CDR2, and CDR3 of SEQ ID NO: 177, the CDR1, CDR2, and CDR3 of SEQ ID NO: 181, or the CDR1, CDR2, and CDR3 of SEQ ID NO: 185.

[0085] In some embodiments, the variable domain of the second light chain comprises the CDR1, CDR2, and CDR3 of SEQ ID NO: 54; the CDR1, CDR2, and CDR3 of SEQ ID NO: 58; the CDR1, CDR2, and CDR3 of SEQ ID NO: 70; the CDR1, CDR2, and CDR3 of SEQ ID NO: 74; the CDR1, CDR2, and CDR3 of SEQ ID NO: 78; the CDR1, CDR2, and CDR3 of SEQ ID NO: 82; the CDR1, CDR2, and CDR3 of SEQ ID NO: 86; the CDR1, CDR2, and CDR3 of SEQ ID NO: 90; the CDR1, CDR2, and CDR3 of SEQ ID NO: 94; the CDR1, CDR2, and CDR3 of SEQ ID NO: 98; the CDR1, CDR2, and CDR3 of SEQ ID NO: 102; the CDR1, CDR2, and CDR3 of SEQ ID NO: 106; the CDR1, CDR2, and CDR3 of SEQ ID NO: 110; the CDR1, CDR2, and CDR3 of SEQ ID NO: 118; the CDR1, CDR2, and CDR3 of SEQ ID NO: 122; the CDR1, CDR2, and CDR3 of SEQ ID NO: 126; the CDR1, CDR2, and CDR3 of SEQ ID NO: 130; the CDR1, CDR2, and CDR3 of SEQ ID NO: 134; the CDR1, CDR2, and CDR3 of SEQ ID NO: 142; the CDR1, CDR2, and CDR3 of SEQ ID NO: 146; the CDR1, CDR2, and CDR3 of SEQ ID NO: 150; the CDR1, CDR2, and CDR3 of SEQ ID NO: 154; the CDR1, CDR2, and CDR3 of SEQ ID NO: 158; the CDR1, CDR2, and CDR3 of SEQ ID NO: 162, the CDR1, CDR2, and CDR3 of SEQ ID NO: 166; the CDR1, CDR2, and CDR3 of SEQ ID NO: 170, the CDR1, CDR2, and CDR3 of SEQ ID NO: 174, the CDR1, CDR2, and CDR3 of SEQ ID NO: 178, the CDR1, CDR2, and CDR3 of SEQ ID NO: 182, or the CDR1, CDR2, and CDR3 of SEQ ID NO: 186.

[0086] In some embodiments, the molecule comprises SEQ ID NO: 51, SEQ ID NO: 52, SEQ ID NO: 53, and SEQ ID NO: 54. In some embodiments, the molecule comprises SEQ ID NO: 55, SEQ ID NO: 56, SEQ ID NO: 57, and SEQ ID NO: 58. In some embodiments, the molecule comprises SEQ ID NO: 67, SEQ ID NO: 68, SEQ ID NO: 69, and SEQ ID NO: 70. In some embodiments, the molecule comprises SEQ ID NO: 71, SEQ ID NO: 72, SEQ ID NO: 73, and SEQ ID NO: 74. In some embodiments, the molecule comprises SEQ ID NO: 75, SEQ ID NO: 76, SEQ ID NO: 77, and SEQ ID NO: 78. In some embodiments, the molecule comprises SEQ ID NO: 79, SEQ ID NO: 80, SEQ ID NO: 81, and SEQ ID NO: 82. In some embodiments, the molecule comprises SEQ ID NO: 83, SEQ ID NO: 84, SEQ ID NO: 85, and SEQ ID NO: 86. In some embodiments, the molecule comprises SEQ ID NO: 87, SEQ ID NO: 88, SEQ ID NO: 89, and SEQ ID NO: 90. In some embodiments, the molecule comprises SEQ ID NO: 91, SEQ ID NO: 92, SEQ ID NO: 93, and SEQ ID NO: 94. In some embodiments, the molecule comprises SEQ ID NO: 95, SEQ ID NO: 96, SEQ ID NO: 97, and SEQ ID NO: 98. In some embodiments, the molecule comprises SEQ ID NO: 99, SEQ ID NO: 100, SEQ ID NO: 101, and SEQ ID NO: 102. In some embodiments, the molecule comprises SEQ ID NO: 103, SEQ ID NO: 104, SEQ ID NO: 105, and SEQ ID NO: 106. In some embodiments, the molecule comprises SEQ ID NO: 107, SEQ ID NO: 108, SEQ ID NO: 109, and SEQ ID NO: 110. In some embodiments, the molecule comprises SEQ ID NO: 115, SEQ ID NO: 116, SEQ ID NO: 117, and SEQ ID NO: 118. In some embodiments, the molecule comprises SEQ ID NO: 119, SEQ ID NO: 120, SEQ ID NO: 121, and SEQ ID NO: 122.

[0087] In some embodiments, the molecule comprises SEQ ID NO: 123, SEQ ID NO: 124, SEQ ID NO: 125, and SEQ ID NO: 126. In some embodiments, the molecule comprises SEQ ID NO: 127, SEQ ID NO: 128, SEQ ID NO: 129, and SEQ ID NO: 130. In some embodiments, the molecule comprises SEQ ID NO: 131, SEQ ID NO: 132, SEQ ID NO: 133, and SEQ ID NO: 133. In some embodiments, the molecule comprises SEQ ID NO: 139, SEQ ID NO: 140, SEQ ID NO: 141, and SEQ ID NO: 142. In some embodiments, the molecule comprises SEQ ID NO: 143, SEQ ID NO: 144, SEQ ID NO: 145, and SEQ ID NO: 146. In some embodiments, the molecule comprises SEQ ID NO: 147, SEQ ID NO: 148, SEQ ID NO: 149, and SEQ ID NO: 150. In some embodiments, the molecule comprises SEQ ID NO: 151, SEQ ID NO: 152, SEQ ID NO: 153, and SEQ ID NO: 154. In some embodiments, the molecule comprises SEQ ID NO: 155, SEQ ID NO: 156, SEQ ID NO: 157, and SEQ ID NO: 158. In some embodiments, the molecule comprises SEQ ID NO: 159, SEQ ID NO: 160, SEQ ID NO: 161, and SEQ ID NO: 162. In some embodiments, the molecule comprises SEQ ID NO: 163, SEQ ID NO: 164, SEQ ID NO: 165, and SEQ ID NO: 166. In some embodiments, the molecule comprises SEQ ID NO: 167, SEQ ID NO: 168, SEQ ID NO: 169, and SEQ ID NO: 170. In some embodiments, the molecule comprises SEQ ID NO: 171, SEQ ID NO: 172, SEQ ID NO: 173, and SEQ ID NO: 174. In some embodiments, the molecule comprises SEQ ID NO: 175, SEQ ID NO: 176, SEQ ID NO: 177, and SEQ ID NO: 178. In some embodiments, the molecule comprises SEQ ID NO: 179, SEQ ID NO: 180, SEQ ID NO: 181, and SEQ ID NO: 182. In some embodiments, the molecule comprises SEQ ID NO: 183, SEQ ID NO: 184, SEQ ID NO: 185, and SEQ ID NO: 186.

[0088] In some embodiments, the molecule further comprises one or more disulfide bonds. In some embodiments, the molecule further comprises one or more linker sequences. In some embodiments, the molecule is capable of neutralizing a coronavirus. In some embodiments, the coronavirus is a SARS-CoV-2 virus. In some embodiments, the SARS-CoV-2 virus strain is selected from the group consisting of WA1, B.1.1.7, B1.526, B1.351, P1, B1.352, and B.1.427.

[0089] In some embodiments, the molecule specifically recognizes a first epitope and a second epitope on a SARS-CoV-2 particle. In some embodiments, the first epitope comprises at least a portion of a receptor binding domain (RBD) on a spike protein of a SARS-CoV-2 particle. In some embodiments, the second epitope comprises at least a portion of a N-terminal domain (NTD) on a spike protein of a SARS-CoV-2 particle.

[0090] In certain aspects, the invention provides a method of treating or preventing a COVID-19 infection in a subject in need thereof, the method comprising administering to the subject a composition comprising a bispecific molecule comprising a first polypeptide chain and a second polypeptide chain, wherein: the first polypeptide chain comprises: a first light chain comprising a variable domain and a constant domain; a first heavy chain comprising a variable domain and a constant domain; the second polypeptide chain comprises: a second light chain comprising a variable domain and a constant domain; and a second heavy chain comprising a variable domain and a constant domain.

[0091] In some embodiments, the first polypeptide chain and the second polypeptide chain are covalently bonded to one another. In some embodiments, the first heavy chain comprises a polypeptide sequence which is at least 60%, 62%, 65%, 67%, 70%, 72%, 75%, 77%, 80%, 82%, 85%, 87%, 90%, 92%, 95%, 97%, 98%, 99% identical to SEQ ID NO: 51, a polypeptide sequence which is at least 60%, 62%, 65%, 67%, 70%, 72%, 75%, 77%, 80%, 82%, 85%, 87%, 90%, 92%, 95%, 97%, 98%, 99% identical to SEQ ID NO: 55, a polypeptide sequence which is at least 60%, 62%, 65%, 67%, 70%, 72%, 75%, 77%, 80%, 82%, 85%, 87%, 90%, 92%, 95%, 97%, 98%, 99% identical to SEQ ID NO: 67, a polypeptide sequence which is at least 60%, 62%, 65%, 67%, 70%, 72%, 75%, 77%, 80%, 82%, 85%, 87%, 90%, 92%, 95%, 97%, 98%, 99% identical to SEQ ID NO: 71, a polypeptide sequence which is at least 60%, 62%, 65%, 67%, 70%, 72%, 75%, 77%, 80%, 82%, 85%, 87%, 90%, 92%, 95%, 97%, 98%, 99% identical to SEQ ID NO: 75, a polypeptide sequence which is at least 60%, 62%, 65%, 67%, 70%, 72%, 75%, 77%, 80%, 82%, 85%, 87%, 90%, 92%, 95%, 97%, 98%, 99% identical to SEQ ID NO: 79, a polypeptide sequence which is at least 60%, 62%, 65%, 67%, 70%, 72%, 75%, 77%, 80%, 82%, 85%, 87%, 90%, 92%, 95%, 97%, 98%, 99% identical to SEQ ID NO: 83, a polypeptide sequence which is at least 60%, 62%, 65%, 67%, 70%, 72%, 75%, 77%, 80%, 82%, 85%, 87%, 90%, 92%, 95%, 97%, 98%, 99% identical to SEQ ID NO: 87, a polypeptide sequence which is at least 60%, 62%, 65%, 67%, 70%, 72%, 75%, 77%, 80%, 82%, 85%, 87%, 90%, 92%, 95%, 97%, 98%, 99% identical to SEQ ID NO: 91, a polypeptide sequence which is at least 60%, 62%, 65%, 67%, 70%, 72%, 75%, 77%, 80%, 82%, 85%, 87%, 90%, 92%, 95%, 97%, 98%, 99% identical to SEQ ID NO: 95, a polypeptide sequence which is at least 60%, 62%, 65%, 67%, 70%, 72%, 75%, 77%, 80%, 82%, 85%, 87%, 90%, 92%, 95%, 97%, 98%, 99% identical to SEQ ID NO: 99, a polypeptide sequence which is at least 60%, 62%, 65%, 67%, 70%, 72%, 75%, 77%, 80%, 82%, 85%, 87%, 90%, 92%, 95%, 97%, 98%, 99% identical to SEQ ID NO: 103, a polypeptide sequence which is at least 60%, 62%, 65%, 67%, 70%, 72%, 75%, 77%, 80%, 82%, 85%, 87%, 90%, 92%, 95%, 97%, 98%, 99% identical to SEQ ID NO: 107, a polypeptide sequence which is at least 60%, 62%, 65%, 67%, 70%, 72%, 75%, 77%, 80%, 82%, 85%, 87%, 90%, 92%, 95%, 97%, 98%, 99% identical to SEQ ID NO: 115, a polypeptide sequence which is at least 60%, 62%, 65%, 67%, 70%, 72%, 75%, 77%, 80%, 82%, 85%, 87%, 90%, 92%, 95%, 97%, 98%, 99% identical to SEQ ID NO: 119, a polypeptide sequence which is at least 60%, 62%, 65%, 67%, 70%, 72%, 75%, 77%, 80%, 82%, 85%, 87%, 90%, 92%, 95%, 97%, 98%, 99% identical to SEQ ID NO: 123, a polypeptide sequence which is at least 60%, 62%, 65%, 67%, 70%, 72%, 75%, 77%, 80%, 82%, 85%, 87%, 90%, 92%, 95%, 97%, 98%, 99% identical to SEQ ID NO: 127, a polypeptide sequence which is at least 60%, 62%, 65%, 67%, 70%, 72%, 75%, 77%, 80%, 82%, 85%, 87%, 90%, 92%, 95%, 97%, 98%, 99% identical to SEQ ID NO: 131, a polypeptide sequence which is at least 60%, 62%, 65%, 67%, 70%, 72%, 75%, 77%, 80%, 82%, 85%, 87%, 90%, 92%, 95%, 97%, 98%, 99% identical to SEQ ID NO: 139, a polypeptide sequence which is at least 60%, 62%, 65%, 67%, 70%, 72%, 75%, 77%, 80%, 82%, 85%, 87%, 90%, 92%, 95%, 97%, 98%, 99% identical to SEQ ID NO: 143, a polypeptide sequence which is at least 60%, 62%, 65%, 67%, 70%, 72%, 75%, 77%, 80%, 82%, 85%, 87%, 90%, 92%, 95%, 97%, 98%, 99% identical to SEQ ID NO: 147, a polypeptide sequence which is at least 60%, 62%, 65%, 67%, 70%, 72%, 75%, 77%, 80%, 82%, 85%, 87%, 90%, 92%, 95%, 97%, 98%, 99% identical to SEQ ID NO: 151, a polypeptide sequence which is at least 60%, 62%, 65%, 67%, 70%, 72%, 75%, 77%, 80%, 82%, 85%, 87%, 90%, 92%, 95%, 97%, 98%, 99% identical to SEQ ID NO: 155, a polypeptide sequence which is at least 60%, 62%, 65%, 67%, 70%, 72%, 75%, 77%, 80%, 82%, 85%, 87%, 90%, 92%, 95%, 97%, 98%, 99% identical to SEQ ID NO: 159, a polypeptide sequence which is at least 60%, 62%, 65%, 67%, 70%, 72%, 75%, 77%, 80%, 82%, 85%, 87%, 90%, 92%, 95%, 97%, 98%, 99% identical to SEQ ID NO: 163, a polypeptide sequence which is at least 60%, 62%, 65%, 67%, 70%, 72%, 75%, 77%, 80%, 82%, 85%, 87%, 90%, 92%, 95%, 97%, 98%, 99% identical to SEQ ID NO: 167, a polypeptide sequence which is at least 60%, 62%, 65%, 67%, 70%, 72%, 75%, 77%, 80%, 82%, 85%, 87%, 90%, 92%, 95%, 97%, 98%, 99% identical to SEQ ID NO: 171, a polypeptide sequence which is at least 60%, 62%, 65%, 67%, 70%, 72%, 75%, 77%, 80%, 82%, 85%, 87%, 90%, 92%, 95%, 97%, 98%, 99% identical to SEQ ID NO: 175, a polypeptide sequence which is at least 60%, 62%, 65%, 67%, 70%, 72%, 75%, 77%, 80%, 82%, 85%, 87%, 90%, 92%, 95%, 97%, 98%, 99% identical to SEQ ID NO: 179, or a polypeptide sequence which is at least 60%, 62%, 65%, 67%, 70%, 72%, 75%, 77%, 80%, 82%, 85%, 87%, 90%, 92%, 95%, 97%, 98%, 99% identical to SEQ ID NO:183.

[0092] In some embodiments, the first light chain comprises a polypeptide sequence which is at least 60%, 62%, 65%, 67%, 70%, 72%, 75%, 77%, 80%, 82%, 85%, 87%, 90%, 92%, 95%, 97%, 98%, 99% identical to SEQ ID NO: 52, a polypeptide sequence which is at least 60%, 62%, 65%, 67%, 70%, 72%, 75%, 77%, 80%, 82%, 85%, 87%, 90%, 92%, 95%, 97%, 98%, 99% identical to SEQ ID NO: 56, a polypeptide sequence which is at least 60%, 62%, 65%, 67%, 70%, 72%, 75%, 77%, 80%, 82%, 85%, 87%, 90%, 92%, 95%, 97%, 98%, 99% identical to SEQ ID NO: 68; a polypeptide sequence which is at least 60%, 62%, 65%, 67%, 70%, 72%, 75%, 77%, 80%, 82%, 85%, 87%, 90%, 92%, 95%, 97%, 98%, 99% identical to SEQ ID NO: 72, a polypeptide sequence which is at least 60%, 62%, 65%, 67%, 70%, 72%, 75%, 77%, 80%, 82%, 85%, 87%, 90%, 92%, 95%, 97%, 98%, 99% identical to SEQ ID NO: 76, a polypeptide sequence which is at least 60%, 62%, 65%, 67%, 70%, 72%, 75%, 77%, 80%, 82%, 85%, 87%, 90%, 92%, 95%, 97%, 98%, 99% identical to SEQ ID NO: 80, a polypeptide sequence which is at least 60%, 62%, 65%, 67%, 70%, 72%, 75%, 77%, 80%, 82%, 85%, 87%, 90%, 92%, 95%, 97%, 98%, 99% identical to SEQ ID NO: 84, a polypeptide sequence which is at least 60%, 62%, 65%, 67%, 70%, 72%, 75%, 77%, 80%, 82%, 85%, 87%, 90%, 92%, 95%, 97%, 98%, 99% identical to SEQ ID NO: 88, a polypeptide sequence which is at least 60%, 62%, 65%, 67%, 70%, 72%, 75%, 77%, 80%, 82%, 85%, 87%, 90%, 92%, 95%, 97%, 98%, 99% identical to SEQ ID NO: 92, a polypeptide sequence which is at least 60%, 62%, 65%, 67%, 70%, 72%, 75%, 77%, 80%, 82%, 85%, 87%, 90%, 92%, 95%, 97%, 98%, 99% identical to SEQ ID NO: 96, a polypeptide sequence which is at least 60%, 62%, 65%, 67%, 70%, 72%, 75%, 77%, 80%, 82%, 85%, 87%, 90%, 92%, 95%, 97%, 98%, 99% identical to SEQ ID NO: 100, a polypeptide sequence which is at least 60%, 62%, 65%, 67%, 70%, 72%, 75%, 77%, 80%, 82%, 85%, 87%, 90%, 92%, 95%, 97%, 98%, 99% identical to SEQ ID NO: 104, a polypeptide sequence which is at least 60%, 62%, 65%, 67%, 70%, 72%, 75%, 77%, 80%, 82%, 85%, 87%, 90%, 92%, 95%, 97%, 98%, 99% identical to SEQ ID NO: 108, a polypeptide sequence which is at least 60%, 62%, 65%, 67%, 70%, 72%, 75%, 77%, 80%, 82%, 85%, 87%, 90%, 92%, 95%, 97%, 98%, 99% identical to SEQ ID NO: 116, a polypeptide sequence which is at least 60%, 62%, 65%, 67%, 70%, 72%, 75%, 77%, 80%, 82%, 85%, 87%, 90%, 92%, 95%, 97%, 98%, 99% identical to SEQ ID NO: 120, a polypeptide sequence which is at least 60%, 62%, 65%, 67%, 70%, 72%, 75%, 77%, 80%, 82%, 85%, 87%, 90%, 92%, 95%, 97%, 98%, 99% identical to SEQ ID NO: 124, a polypeptide sequence which is at least 60%, 62%, 65%, 67%, 70%, 72%, 75%, 77%, 80%, 82%, 85%, 87%, 90%, 92%, 95%, 97%, 98%, 99% identical to SEQ ID NO: 128, a polypeptide sequence which is at least 60%, 62%, 65%, 67%, 70%, 72%, 75%, 77%, 80%, 82%, 85%, 87%, 90%, 92%, 95%, 97%, 98%, 99% identical to SEQ ID NO: 132, a polypeptide sequence which is at least 60%, 62%, 65%, 67%, 70%, 72%, 75%, 77%, 80%, 82%, 85%, 87%, 90%, 92%, 95%, 97%, 98%, 99% identical to SEQ ID NO: 140, a polypeptide sequence which is at least 60%, 62%, 65%, 67%, 70%, 72%, 75%, 77%, 80%, 82%, 85%, 87%, 90%, 92%, 95%, 97%, 98%, 99% identical to SEQ ID NO: 144, a polypeptide sequence which is at least 60%, 62%, 65%, 67%, 70%, 72%, 75%, 77%, 80%, 82%, 85%, 87%, 90%, 92%, 95%, 97%, 98%, 99% identical to SEQ ID NO: 148, a polypeptide sequence which is at least 60%, 62%, 65%, 67%, 70%, 72%, 75%, 77%, 80%, 82%, 85%, 87%, 90%, 92%, 95%, 97%, 98%, 99% identical to SEQ ID NO: 152, a polypeptide sequence which is at least 60%, 62%, 65%, 67%, 70%, 72%, 75%, 77%, 80%, 82%, 85%, 87%, 90%, 92%, 95%, 97%, 98%, 99% identical to SEQ ID NO: 156, a polypeptide sequence which is at least 60%, 62%, 65%, 67%, 70%, 72%, 75%, 77%, 80%, 82%, 85%, 87%, 90%, 92%, 95%, 97%, 98%, 99% identical to SEQ ID NO: 160, a polypeptide sequence which is at least 60%, 62%, 65%, 67%, 70%, 72%, 75%, 77%, 80%, 82%, 85%, 87%, 90%, 92%, 95%, 97%, 98%, 99% identical to SEQ ID NO: 164, a polypeptide sequence which is at least 60%, 62%, 65%, 67%, 70%, 72%, 75%, 77%, 80%, 82%, 85%, 87%, 90%, 92%, 95%, 97%, 98%, 99% identical to SEQ ID NO: 168, a polypeptide sequence which is at least 60%, 62%, 65%, 67%, 70%, 72%, 75%, 77%, 80%, 82%, 85%, 87%, 90%, 92%, 95%, 97%, 98%, 99% identical to SEQ ID NO: 172, a polypeptide sequence which is at least 60%, 62%, 65%, 67%, 70%, 72%, 75%, 77%, 80%, 82%, 85%, 87%, 90%, 92%, 95%, 97%, 98%, 99% identical to SEQ ID NO: 176, a polypeptide sequence which is at least 60%, 62%, 65%, 67%, 70%, 72%, 75%, 77%, 80%, 82%, 85%, 87%, 90%, 92%, 95%, 97%, 98%, 99% identical to SEQ ID NO: 180, or a polypeptide sequence which is at least 60%, 62%, 65%, 67%, 70%, 72%, 75%, 77%, 80%, 82%, 85%, 87%, 90%, 92%, 95%, 97%, 98%, 99% identical to SEQ ID NO:184.

[0093] In some embodiments, the second heavy chain comprises a polypeptide sequence which is at least 60%, 62%, 65%, 67%, 70%, 72%, 75%, 77%, 80%, 82%, 85%, 87%, 90%, 92%, 95%, 97%, 98%, 99% identical to SEQ ID NO: 53, a polypeptide sequence which is at least 60%, 62%, 65%, 67%, 70%, 72%, 75%, 77%, 80%, 82%, 85%, 87%, 90%, 92%, 95%, 97%, 98%, 99% identical to SEQ ID NO: 57, a polypeptide sequence which is at least 60%, 62%, 65%, 67%, 70%, 72%, 75%, 77%, 80%, 82%, 85%, 87%, 90%, 92%, 95%, 97%, 98%, 99% identical to SEQ ID NO: 69, a polypeptide sequence which is at least 60%, 62%, 65%, 67%, 70%, 72%, 75%, 77%, 80%, 82%, 85%, 87%, 90%, 92%, 95%, 97%, 98%, 99% identical to SEQ ID NO: 73, a polypeptide sequence which is at least 60%, 62%, 65%, 67%, 70%, 72%, 75%, 77%, 80%, 82%, 85%, 87%, 90%, 92%, 95%, 97%, 98%, 99% identical to SEQ ID NO: 77, a polypeptide sequence which is at least 60%, 62%, 65%, 67%, 70%, 72%, 75%, 77%, 80%, 82%, 85%, 87%, 90%, 92%, 95%, 97%, 98%, 99% identical to SEQ ID NO: 81, a polypeptide sequence which is at least 60%, 62%, 65%, 67%, 70%, 72%, 75%, 77%, 80%, 82%, 85%, 87%, 90%, 92%, 95%, 97%, 98%, 99% identical to SEQ ID NO: 85, a polypeptide sequence which is at least 60%, 62%, 65%, 67%, 70%, 72%, 75%, 77%, 80%, 82%, 85%, 87%, 90%, 92%, 95%, 97%, 98%, 99% identical to SEQ ID NO: 89, a polypeptide sequence which is at least 60%, 62%, 65%, 67%, 70%, 72%, 75%, 77%, 80%, 82%, 85%, 87%, 90%, 92%, 95%, 97%, 98%, 99% identical to SEQ ID NO: 93, a polypeptide sequence which is at least 60%, 62%, 65%, 67%, 70%, 72%, 75%, 77%, 80%, 82%, 85%, 87%, 90%, 92%, 95%, 97%, 98%, 99% identical to SEQ ID NO: 97, a polypeptide sequence which is at least 60%, 62%, 65%, 67%, 70%, 72%, 75%, 77%, 80%, 82%, 85%, 87%, 90%, 92%, 95%, 97%, 98%, 99% identical to SEQ ID NO: 101, a polypeptide sequence which is at least 60%, 62%, 65%, 67%, 70%, 72%, 75%, 77%, 80%, 82%, 85%, 87%, 90%, 92%, 95%, 97%, 98%, 99% identical to SEQ ID NO: 105, a polypeptide sequence which is at least 60%, 62%, 65%, 67%, 70%, 72%, 75%, 77%, 80%, 82%, 85%, 87%, 90%, 92%, 95%, 97%, 98%, 99% identical to SEQ ID NO: 109, a polypeptide sequence which is at least 60%, 62%, 65%, 67%, 70%, 72%, 75%, 77%, 80%, 82%, 85%, 87%, 90%, 92%, 95%, 97%, 98%, 99% identical to SEQ ID NO: 117, a polypeptide sequence which is at least 60%, 62%, 65%, 67%, 70%, 72%, 75%, 77%, 80%, 82%, 85%, 87%, 90%, 92%, 95%, 97%, 98%, 99% identical to SEQ ID NO: 121, a polypeptide sequence which is at least 60%, 62%, 65%, 67%, 70%, 72%, 75%, 77%, 80%, 82%, 85%, 87%, 90%, 92%, 95%, 97%, 98%, 99% identical to SEQ ID NO: 125, a polypeptide sequence which is at least 60%, 62%, 65%, 67%, 70%, 72%, 75%, 77%, 80%, 82%, 85%, 87%, 90%, 92%, 95%, 97%, 98%, 99% identical to SEQ ID NO: 129, a polypeptide sequence which is at least 60%, 62%, 65%, 67%, 70%, 72%, 75%, 77%, 80%, 82%, 85%, 87%, 90%, 92%, 95%, 97%, 98%, 99% identical to SEQ ID NO: 133, a polypeptide sequence which is at least 60%, 62%, 65%, 67%, 70%, 72%, 75%, 77%, 80%, 82%, 85%, 87%, 90%, 92%, 95%, 97%, 98%, 99% identical to SEQ ID NO: 141, a polypeptide sequence which is at least 60%, 62%, 65%, 67%, 70%, 72%, 75%, 77%, 80%, 82%, 85%, 87%, 90%, 92%, 95%, 97%, 98%, 99% identical to SEQ ID NO: 145, a polypeptide sequence which is at least 60%, 62%, 65%, 67%, 70%, 72%, 75%, 77%, 80%, 82%, 85%, 87%, 90%, 92%, 95%, 97%, 98%, 99% identical to SEQ ID NO: 149, a polypeptide sequence which is at least 60%, 62%, 65%, 67%, 70%, 72%, 75%, 77%, 80%, 82%, 85%, 87%, 90%, 92%, 95%, 97%, 98%, 99% identical to SEQ ID NO: 153, a polypeptide sequence which is at least 60%, 62%, 65%, 67%, 70%, 72%, 75%, 77%, 80%, 82%, 85%, 87%, 90%, 92%, 95%, 97%, 98%, 99% identical to SEQ ID NO: 157, a polypeptide sequence which is at least 60%, 62%, 65%, 67%, 70%, 72%, 75%, 77%, 80%, 82%, 85%, 87%, 90%, 92%, 95%, 97%, 98%, 99% identical to SEQ ID NO: 161, a polypeptide sequence which is at least 60%, 62%, 65%, 67%, 70%, 72%, 75%, 77%, 80%, 82%, 85%, 87%, 90%, 92%, 95%, 97%, 98%, 99% identical to SEQ ID NO: 165, a polypeptide sequence which is at least 60%, 62%, 65%, 67%, 70%, 72%, 75%, 77%, 80%, 82%, 85%, 87%, 90%, 92%, 95%, 97%, 98%, 99% identical to SEQ ID NO: 169, a polypeptide sequence which is at least 60%, 62%, 65%, 67%, 70%, 72%, 75%, 77%, 80%, 82%, 85%, 87%, 90%, 92%, 95%, 97%, 98%, 99% identical to SEQ ID NO: 173, a polypeptide sequence which is at least 60%, 62%, 65%, 67%, 70%, 72%, 75%, 77%, 80%, 82%, 85%, 87%, 90%, 92%, 95%, 97%, 98%, 99% identical to SEQ ID NO: 177, a polypeptide sequence which is at least 60%, 62%, 65%, 67%, 70%, 72%, 75%, 77%, 80%, 82%, 85%, 87%, 90%, 92%, 95%, 97%, 98%, 99% identical to SEQ ID NO: 181, or a polypeptide sequence which is at least 60%, 62%, 65%, 67%, 70%, 72%, 75%, 77%, 80%, 82%, 85%, 87%, 90%, 92%, 95%, 97%, 98%, 99% identical to SEQ ID NO: 185.

[0094] In some embodiments, the second light chain comprises a polypeptide sequence which is at least 60%, 62%, 65%, 67%, 70%, 72%, 75%, 77%, 80%, 82%, 85%, 87%, 90%, 92%, 95%, 97%, 98%, 99% identical to SEQ ID NO: 54, a polypeptide sequence which is at least 60%, 62%, 65%, 67%, 70%, 72%, 75%, 77%, 80%, 82%, 85%, 87%, 90%, 92%, 95%, 97%, 98%, 99% identical to SEQ ID NO: 58, a polypeptide sequence which is at least 60%, 62%, 65%, 67%, 70%, 72%, 75%, 77%, 80%, 82%, 85%, 87%, 90%, 92%, 95%, 97%, 98%, 99% identical to SEQ ID NO: 70, a polypeptide sequence which is at least 60%, 62%, 65%, 67%, 70%, 72%, 75%, 77%, 80%, 82%, 85%, 87%, 90%, 92%, 95%, 97%, 98%, 99% identical to SEQ ID NO: 74, a polypeptide sequence which is at least 60%, 62%, 65%, 67%, 70%, 72%, 75%, 77%, 80%, 82%, 85%, 87%, 90%, 92%, 95%, 97%, 98%, 99% identical to SEQ ID NO: 78, a polypeptide sequence which is at least 60%, 62%, 65%, 67%, 70%, 72%, 75%, 77%, 80%, 82%, 85%, 87%, 90%, 92%, 95%, 97%, 98%, 99% identical to SEQ ID NO: 82, a polypeptide sequence which is at least 60%, 62%, 65%, 67%, 70%, 72%, 75%, 77%, 80%, 82%, 85%, 87%, 90%, 92%, 95%, 97%, 98%, 99% identical to SEQ ID NO: 86, a polypeptide sequence which is at least 60%, 62%, 65%, 67%, 70%, 72%, 75%, 77%, 80%, 82%, 85%, 87%, 90%, 92%, 95%, 97%, 98%, 99% identical to SEQ ID NO: 90, a polypeptide sequence which is at least 60%, 62%, 65%, 67%, 70%, 72%, 75%, 77%, 80%, 82%, 85%, 87%, 90%, 92%, 95%, 97%, 98%, 99% identical to SEQ ID NO: 94, a polypeptide sequence which is at least 60%, 62%, 65%, 67%, 70%, 72%, 75%, 77%, 80%, 82%, 85%, 87%, 90%, 92%, 95%, 97%, 98%, 99% identical to SEQ ID NO: 98, a polypeptide sequence which is at least 60%, 62%, 65%, 67%, 70%, 72%, 75%, 77%, 80%, 82%, 85%, 87%, 90%, 92%, 95%, 97%, 98%, 99% identical to SEQ ID NO: 102, a polypeptide sequence which is at least 60%, 62%, 65%, 67%, 70%, 72%, 75%, 77%, 80%, 82%, 85%, 87%, 90%, 92%, 95%, 97%, 98%, 99% identical to SEQ ID NO: 106, a polypeptide sequence which is at least 60%, 62%, 65%, 67%, 70%, 72%, 75%, 77%, 80%, 82%, 85%, 87%, 90%, 92%, 95%, 97%, 98%, 99% identical to SEQ ID NO: 110, a polypeptide sequence which is at least 60%, 62%, 65%, 67%, 70%, 72%, 75%, 77%, 80%, 82%, 85%, 87%, 90%, 92%, 95%, 97%, 98%, 99% identical to SEQ ID NO: 118, a polypeptide sequence which is at least 60%, 62%, 65%, 67%, 70%, 72%, 75%, 77%, 80%, 82%, 85%, 87%, 90%, 92%, 95%, 97%, 98%, 99% identical to SEQ ID NO: 122, a polypeptide sequence which is at least 60%, 62%, 65%, 67%, 70%, 72%, 75%, 77%, 80%, 82%, 85%, 87%, 90%, 92%, 95%, 97%, 98%, 99% identical to SEQ ID NO: 126, a polypeptide sequence which is at least 60%, 62%, 65%, 67%, 70%, 72%, 75%, 77%, 80%, 82%, 85%, 87%, 90%, 92%, 95%, 97%, 98%, 99% identical to SEQ ID NO: 130, a polypeptide sequence which is at least 60%, 62%, 65%, 67%, 70%, 72%, 75%, 77%, 80%, 82%, 85%, 87%, 90%, 92%, 95%, 97%, 98%, 99% identical to SEQ ID NO: 134, a polypeptide sequence which is at least 60%, 62%, 65%, 67%, 70%, 72%, 75%, 77%, 80%, 82%, 85%, 87%, 90%, 92%, 95%, 97%, 98%, 99% identical to SEQ ID NO: 142, a polypeptide sequence which is at least 60%, 62%, 65%, 67%, 70%, 72%, 75%, 77%, 80%, 82%, 85%, 87%, 90%, 92%, 95%, 97%, 98%, 99% identical to SEQ ID NO: 146, a polypeptide sequence which is at least 60%, 62%, 65%, 67%, 70%, 72%, 75%, 77%, 80%, 82%, 85%, 87%, 90%, 92%, 95%, 97%, 98%, 99% identical to SEQ ID NO: 150, a polypeptide sequence which is at least 60%, 62%, 65%, 67%, 70%, 72%, 75%, 77%, 80%, 82%, 85%, 87%, 90%, 92%, 95%, 97%, 98%, 99% identical to SEQ ID NO: 154, a polypeptide sequence which is at least 60%, 62%, 65%, 67%, 70%, 72%, 75%, 77%, 80%, 82%, 85%, 87%, 90%, 92%, 95%, 97%, 98%, 99% identical to SEQ ID NO: 158, a polypeptide sequence which is at least 60%, 62%, 65%, 67%, 70%, 72%, 75%, 77%, 80%, 82%, 85%, 87%, 90%, 92%, 95%, 97%, 98%, 99% identical to SEQ ID NO: 162, a polypeptide sequence which is at least 60%, 62%, 65%, 67%, 70%, 72%, 75%, 77%, 80%, 82%, 85%, 87%, 90%, 92%, 95%, 97%, 98%, 99% identical to SEQ ID NO: 166, a polypeptide sequence which is at least 60%, 62%, 65%, 67%, 70%, 72%, 75%, 77%, 80%, 82%, 85%, 87%, 90%, 92%, 95%, 97%, 98%, 99% identical to SEQ ID NO: 170, a polypeptide sequence which is at least 60%, 62%, 65%, 67%, 70%, 72%, 75%, 77%, 80%, 82%, 85%, 87%, 90%, 92%, 95%, 97%, 98%, 99% identical to SEQ ID NO: 174, a polypeptide sequence which is at least 60%, 62%, 65%, 67%, 70%, 72%, 75%, 77%, 80%, 82%, 85%, 87%, 90%, 92%, 95%, 97%, 98%, 99% identical to SEQ ID NO: 178, a polypeptide sequence which is at least 60%, 62%, 65%, 67%, 70%, 72%, 75%, 77%, 80%, 82%, 85%, 87%, 90%, 92%, 95%, 97%, 98%, 99% identical to SEQ ID NO: 182, or a polypeptide sequence which is at least 60%, 62%, 65%, 67%, 70%, 72%, 75%, 77%, 80%, 82%, 85%, 87%, 90%, 92%, 95%, 97%, 98%, 99% identical to SEQ ID NO: 186.

[0095] In some embodiments, the variable domain of the first heavy chain comprises a polypeptide sequence which is at least 60%, 62%, 65%, 67%, 70%, 72%, 75%, 77%, 80%, 82%, 85%, 87%, 90%, 92%, 95%, 97%, 98%, 99% identical to SEQ ID NO: 15, a polypeptide sequence which is at least 60%, 62%, 65%, 67%, 70%, 72%, 75%, 77%, 80%, 82%, 85%, 87%, 90%, 92%, 95%, 97%, 98%, 99% identical to SEQ ID NO: 27, a polypeptide sequence which is at least 60%, 62%, 65%, 67%, 70%, 72%, 75%, 77%, 80%, 82%, 85%, 87%, 90%, 92%, 95%, 97%, 98%, 99% identical to SEQ ID NO: 35, a polypeptide sequence which is at least 60%, 62%, 65%, 67%, 70%, 72%, 75%, 77%, 80%, 82%, 85%, 87%, 90%, 92%, 95%, 97%, 98%, 99% identical to SEQ ID NO: 25, a polypeptide sequence which is at least 60%, 62%, 65%, 67%, 70%, 72%, 75%, 77%, 80%, 82%, 85%, 87%, 90%, 92%, 95%, 97%, 98%, 99% identical to SEQ ID NO: 17, a polypeptide sequence which is at least 60%, 62%, 65%, 67%, 70%, 72%, 75%, 77%, 80%, 82%, 85%, 87%, 90%, 92%, 95%, 97%, 98%, 99% identical to SEQ ID NO: 37, a polypeptide sequence which is at least 60%, 62%, 65%, 67%, 70%, 72%, 75%, 77%, 80%, 82%, 85%, 87%, 90%, 92%, 95%, 97%, 98%, 99% identical to SEQ ID NO: 19, a polypeptide sequence which is at least 60%, 62%, 65%, 67%, 70%, 72%, 75%, 77%, 80%, 82%, 85%, 87%, 90%, 92%, 95%, 97%, 98%, 99% identical to SEQ ID NO: 13, a polypeptide sequence which is at least 60%, 62%, 65%, 67%, 70%, 72%, 75%, 77%, 80%, 82%, 85%, 87%, 90%, 92%, 95%, 97%, 98%, 99% identical to SEQ ID NO: 5, a polypeptide sequence which is at least 60%, 62%, 65%, 67%, 70%, 72%, 75%, 77%, 80%, 82%, 85%, 87%, 90%, 92%, 95%, 97%, 98%, 99% identical to SEQ ID NO: 21, or a polypeptide sequence which is at least 60%, 62%, 65%, 67%, 70%, 72%, 75%, 77%, 80%, 82%, 85%, 87%, 90%, 92%, 95%, 97%, 98%, 99% identical to SEQ ID NO: 41.

[0096] In some embodiments, the variable domain of the first light chain comprises a polypeptide sequence which is at least 60%, 62%, 65%, 67%, 70%, 72%, 75%, 77%, 80%, 82%, 85%, 87%, 90%, 92%, 95%, 97%, 98%, 99% identical to SEQ ID NO: 16, a polypeptide sequence which is at least 60%, 62%, 65%, 67%, 70%, 72%, 75%, 77%, 80%, 82%, 85%, 87%, 90%, 92%, 95%, 97%, 98%, 99% identical to SEQ ID NO: 28, a polypeptide sequence which is at least 60%, 62%, 65%, 67%, 70%, 72%, 75%, 77%, 80%, 82%, 85%, 87%, 90%, 92%, 95%, 97%, 98%, 99% identical to SEQ ID NO: 36, a polypeptide sequence which is at least 60%, 62%, 65%, 67%, 70%, 72%, 75%, 77%, 80%, 82%, 85%, 87%, 90%, 92%, 95%, 97%, 98%, 99% identical to SEQ ID NO: 26, a polypeptide sequence which is at least 60%, 62%, 65%, 67%, 70%, 72%, 75%, 77%, 80%, 82%, 85%, 87%, 90%, 92%, 95%, 97%, 98%, 99% identical to SEQ ID NO: 18, a polypeptide sequence which is at least 60%, 62%, 65%, 67%, 70%, 72%, 75%, 77%, 80%, 82%, 85%, 87%, 90%, 92%, 95%, 97%, 98%, 99% identical to SEQ ID NO: 38, a polypeptide sequence which is at least 60%, 62%, 65%, 67%, 70%, 72%, 75%, 77%, 80%, 82%, 85%, 87%, 90%, 92%, 95%, 97%, 98%, 99% identical to SEQ ID NO: 20, a polypeptide sequence which is at least 60%, 62%, 65%, 67%, 70%, 72%, 75%, 77%, 80%, 82%, 85%, 87%, 90%, 92%, 95%, 97%, 98%, 99% identical to SEQ ID NO: 14, a polypeptide sequence which is at least 60%, 62%, 65%, 67%, 70%, 72%, 75%, 77%, 80%, 82%, 85%, 87%, 90%, 92%, 95%, 97%, 98%, 99% identical to SEQ ID NO: 6, a polypeptide sequence which is at least 60%, 62%, 65%, 67%, 70%, 72%, 75%, 77%, 80%, 82%, 85%, 87%, 90%, 92%, 95%, 97%, 98%, 99% identical to SEQ ID NO: 22, or a polypeptide sequence which is at least 60%, 62%, 65%, 67%, 70%, 72%, 75%, 77%, 80%, 82%, 85%, 87%, 90%, 92%, 95%, 97%, 98%, 99% identical to SEQ ID NO: 42.

[0097] In some embodiments, the variable domain of the second heavy chain comprises a polypeptide sequence which is at least 60%, 62%, 65%, 67%, 70%, 72%, 75%, 77%, 80%, 82%, 85%, 87%, 90%, 92%, 95%, 97%, 98%, 99% identical to SEQ ID NO: 27, a polypeptide sequence which is at least 60%, 62%, 65%, 67%, 70%, 72%, 75%, 77%, 80%, 82%, 85%, 87%, 90%, 92%, 95%, 97%, 98%, 99% identical to SEQ ID NO: 15, a polypeptide sequence which is at least 60%, 62%, 65%, 67%, 70%, 72%, 75%, 77%, 80%, 82%, 85%, 87%, 90%, 92%, 95%, 97%, 98%, 99% identical to SEQ ID NO: 5, a polypeptide sequence which is at least 60%, 62%, 65%, 67%, 70%, 72%, 75%, 77%, 80%, 82%, 85%, 87%, 90%, 92%, 95%, 97%, 98%, 99% identical to SEQ ID NO: 19, a polypeptide sequence which is at least 60%, 62%, 65%, 67%, 70%, 72%, 75%, 77%, 80%, 82%, 85%, 87%, 90%, 92%, 95%, 97%, 98%, 99% identical to SEQ ID NO: 21, a polypeptide sequence which is at least 60%, 62%, 65%, 67%, 70%, 72%, 75%, 77%, 80%, 82%, 85%, 87%, 90%, 92%, 95%, 97%, 98%, 99% identical to SEQ ID NO: 15, a polypeptide sequence which is at least 60%, 62%, 65%, 67%, 70%, 72%, 75%, 77%, 80%, 82%, 85%, 87%, 90%, 92%, 95%, 97%, 98%, 99% identical to SEQ ID NO: 29, a polypeptide sequence which is at least 60%, 62%, 65%, 67%, 70%, 72%, 75%, 77%, 80%, 82%, 85%, 87%, 90%, 92%, 95%, 97%, 98%, 99% identical to SEQ ID NO: 35, a polypeptide sequence which is at least 60%, 62%, 65%, 67%, 70%, 72%, 75%, 77%, 80%, 82%, 85%, 87%, 90%, 92%, 95%, 97%, 98%, 99% identical to SEQ ID NO: 23, a polypeptide sequence which is at least 60%, 62%, 65%, 67%, 70%, 72%, 75%, 77%, 80%, 82%, 85%, 87%, 90%, 92%, 95%, 97%, 98%, 99% identical to SEQ ID NO: 25, a polypeptide sequence which is at least 60%, 62%, 65%, 67%, 70%, 72%, 75%, 77%, 80%, 82%, 85%, 87%, 90%, 92%, 95%, 97%, 98%, 99% identical to SEQ ID NO: 37, a polypeptide sequence which is at least 60%, 62%, 65%, 67%, 70%, 72%, 75%, 77%, 80%, 82%, 85%, 87%, 90%, 92%, 95%, 97%, 98%, 99% identical to SEQ ID NO: 39, a polypeptide sequence which is at least 60%, 62%, 65%, 67%, 70%, 72%, 75%, 77%, 80%, 82%, 85%, 87%, 90%, 92%, 95%, 97%, 98%, 99% identical to SEQ ID NO: 43, or a polypeptide sequence which is at least 60%, 62%, 65%, 67%, 70%, 72%, 75%, 77%, 80%, 82%, 85%, 87%, 90%, 92%, 95%, 97%, 98%, 99% identical to SEQ ID NO: 9.

[0098] In some embodiments, variable domain of the second light chain comprises a polypeptide sequence which is at least 60%, 62%, 65%, 67%, 70%, 72%, 75%, 77%, 80%, 82%, 85%, 87%, 90%, 92%, 95%, 97%, 98%, 99% identical to SEQ ID NO: 28, a polypeptide sequence which is at least 60%, 62%, 65%, 67%, 70%, 72%, 75%, 77%, 80%, 82%, 85%, 87%, 90%, 92%, 95%, 97%, 98%, 99% identical to SEQ ID NO: 16, a polypeptide sequence which is at least 60%, 62%, 65%, 67%, 70%, 72%, 75%, 77%, 80%, 82%, 85%, 87%, 90%, 92%, 95%, 97%, 98%, 99% identical to SEQ ID NO: 6, a polypeptide sequence which is at least 60%, 62%, 65%, 67%, 70%, 72%, 75%, 77%, 80%, 82%, 85%, 87%, 90%, 92%, 95%, 97%, 98%, 99% identical to SEQ ID NO: 20, a polypeptide sequence which is at least 60%, 62%, 65%, 67%, 70%, 72%, 75%, 77%, 80%, 82%, 85%, 87%, 90%, 92%, 95%, 97%, 98%, 99% identical to SEQ ID NO: 22, a polypeptide sequence which is at least 60%, 62%, 65%, 67%, 70%, 72%, 75%, 77%, 80%, 82%, 85%, 87%, 90%, 92%, 95%, 97%, 98%, 99% identical to SEQ ID NO: 16, a polypeptide sequence which is at least 60%, 62%, 65%, 67%, 70%, 72%, 75%, 77%, 80%, 82%, 85%, 87%, 90%, 92%, 95%, 97%, 98%, 99% identical to SEQ ID NO: 30, a polypeptide sequence which is at least 60%, 62%, 65%, 67%, 70%, 72%, 75%, 77%, 80%, 82%, 85%, 87%, 90%, 92%, 95%, 97%, 98%, 99% identical to SEQ ID NO: 36, a polypeptide sequence which is at least 60%, 62%, 65%, 67%, 70%, 72%, 75%, 77%, 80%, 82%, 85%, 87%, 90%, 92%, 95%, 97%, 98%, 99% identical to SEQ ID NO: 24, a polypeptide sequence which is at least 60%, 62%, 65%, 67%, 70%, 72%, 75%, 77%, 80%, 82%, 85%, 87%, 90%, 92%, 95%, 97%, 98%, 99% identical to SEQ ID NO: 26, a polypeptide sequence which is at least 60%, 62%, 65%, 67%, 70%, 72%, 75%, 77%, 80%, 82%, 85%, 87%, 90%, 92%, 95%, 97%, 98%, 99% identical to SEQ ID NO: 38, a polypeptide sequence which is at least 60%, 62%, 65%, 67%, 70%, 72%, 75%, 77%, 80%, 82%, 85%, 87%, 90%, 92%, 95%, 97%, 98%, 99% identical to SEQ ID NO: 40, a polypeptide sequence which is at least 60%, 62%, 65%, 67%, 70%, 72%, 75%, 77%, 80%, 82%, 85%, 87%, 90%, 92%, 95%, 97%, 98%, 99% identical to SEQ ID NO: 44, or a polypeptide sequence which is at least 60%, 62%, 65%, 67%, 70%, 72%, 75%, 77%, 80%, 82%, 85%, 87%, 90%, 92%, 95%, 97%, 98%, 99% identical to SEQ ID NO: 10.

[0099] In some embodiments, the variable domain of the first heavy chain comprises the CDR1, CDR2, and CDR3 of SEQ ID NO: 51; the CDR1, CDR2, and CDR3 of SEQ ID NO: 55; the CDR1, CDR2, and CDR3 of SEQ ID NO: 67; the CDR1, CDR2, and CDR3 of SEQ ID NO: 71; the CDR1, CDR2, and CDR3 of SEQ ID NO: 75; the CDR1, CDR2, and CDR3 of SEQ ID NO: 79; the CDR1, CDR2, and CDR3 of SEQ ID NO: 83; the CDR1, CDR2, and CDR3 of SEQ ID NO: 87; the CDR1, CDR2, and CDR3 of SEQ ID NO: 91; the CDR1, CDR2, and CDR3 of SEQ ID NO: 95; the CDR1, CDR2, and CDR3 of SEQ ID NO: 99; the CDR1, CDR2, and CDR3 of SEQ ID NO: 103; the CDR1, CDR2, and CDR3 of SEQ ID NO: 107; the CDR1, CDR2, and CDR3 of SEQ ID NO: 115; the CDR1, CDR2, and CDR3 of SEQ ID NO: 119, the CDR1, CDR2, and CDR3 of SEQ ID NO: 123, the CDR1, CDR2, and CDR3 of SEQ ID NO: 127; the CDR1, CDR2, and CDR3 of SEQ ID NO: 131; the CDR1, CDR2, and CDR3 of SEQ ID NO: 139; the CDR1, CDR2, and CDR3 of SEQ ID NO: 143; the CDR1, CDR2, and CDR3 of SEQ ID NO: 147; the CDR1, CDR2, and CDR3 of SEQ ID NO: 151; the CDR1, CDR2, and CDR3 of SEQ ID NO: 155; the CDR1, CDR2, and CDR3 of SEQ ID NO: 159; the CDR1, CDR2, and CDR3 of SEQ ID NO: 163; the CDR1, CDR2, and CDR3 of SEQ ID NO: 167, the CDR1, CDR2, and CDR3 of SEQ ID NO: 171, the CDR1, CDR2, and CDR3 of SEQ ID NO: 175, the CDR1, CDR2, and CDR3 of SEQ ID NO: 179, or the CDR1, CDR2, and CDR3 of SEQ ID NO: 183.

[0100] In some embodiments, the variable domain of the first light chain comprises the CDR1, CDR2, and CDR3 of SEQ ID NO: 52; the CDR1, CDR2, and CDR3 of SEQ ID NO: 56; the CDR1, CDR2, and CDR3 of SEQ ID NO: 68; the CDR1, CDR2, and CDR3 of SEQ ID NO: 72; the CDR1, CDR2, and CDR3 of SEQ ID NO: 76; the CDR1, CDR2, and CDR3 of SEQ ID NO: 80; the CDR1, CDR2, and CDR3 of SEQ ID NO: 84; the CDR1, CDR2, and CDR3 of SEQ ID NO: 88; the CDR1, CDR2, and CDR3 of SEQ ID NO: 92; the CDR1, CDR2, and CDR3 of SEQ ID NO: 96; the CDR1, CDR2, and CDR3 of SEQ ID NO: 100; the CDR1, CDR2, and CDR3 of SEQ ID NO: 104; the CDR1, CDR2, and CDR3 of SEQ ID NO: 108; the CDR1, CDR2, and CDR3 of SEQ ID NO: 116; the CDR1, CDR2, and CDR3 of SEQ ID NO: 120; the CDR1, CDR2, and CDR3 of SEQ ID NO: 124; the CDR1, CDR2, and CDR3 of SEQ ID NO: 128; the CDR1, CDR2, and CDR3 of SEQ ID NO: 132; the CDR1, CDR2, and CDR3 of SEQ ID NO: 140; the CDR1, CDR2, and CDR3 of SEQ ID NO: 144; the CDR1, CDR2, and CDR3 of SEQ ID NO: 148; the CDR1, CDR2, and CDR3 of SEQ ID NO: 152; the CDR1, CDR2, and CDR3 of SEQ ID NO: 156; the CDR1, CDR2, and CDR3 of SEQ ID NO: 160; the CDR1, CDR2, and CDR3 of SEQ ID NO: 164; the CDR1, CDR2, and CDR3 of SEQ ID NO: 168, the CDR1, CDR2, and CDR3 of SEQ ID NO: 172, the CDR1, CDR2, and CDR3 of SEQ ID NO: 176, the CDR1, CDR2, and CDR3 of SEQ ID NO: 180, or the CDR1, CDR2, and CDR3 of SEQ ID NO: 184.

[0101] In some embodiments, the variable domain of the second heavy chain comprises the CDR1, CDR2, and CDR3 of SEQ ID NO: 53; the CDR1, CDR2, and CDR3 of SEQ ID NO: 57; the CDR1, CDR2, and CDR3 of SEQ ID NO: 69; the CDR1, CDR2, and CDR3 of SEQ ID NO: 73; the CDR1, CDR2, and CDR3 of SEQ ID NO: 77; the CDR1, CDR2, and CDR3 of SEQ ID NO: 81; the CDR1, CDR2, and CDR3 of SEQ ID NO: 85; the CDR1, CDR2, and CDR3 of SEQ ID NO: 89; the CDR1, CDR2, and CDR3 of SEQ ID NO: 93; the CDR1, CDR2, and CDR3 of SEQ ID NO: 97; the CDR1, CDR2, and CDR3 of SEQ ID NO: 101; the CDR1, CDR2, and CDR3 of SEQ ID NO: 105; the CDR1, CDR2, and CDR3 of SEQ ID NO: 109; the CDR1, CDR2, and CDR3 of SEQ ID NO: 117; the CDR1, CDR2, and CDR3 of SEQ ID NO: 121; the CDR1, CDR2, and CDR3 of SEQ ID NO: 125; the CDR1, CDR2, and CDR3 of SEQ ID NO: 129; the CDR1, CDR2, and CDR3 of SEQ ID NO: 133; the CDR1, CDR2, and CDR3 of SEQ ID NO: 141; the CDR1, CDR2, and CDR3 of SEQ ID NO: 145; the CDR1, CDR2, and CDR3 of SEQ ID NO: 149; the CDR1, CDR2, and CDR3 of SEQ ID NO: 153; the CDR1, CDR2, and CDR3 of SEQ ID NO: 157; the CDR1, CDR2, and CDR3 of SEQ ID NO: 161; the CDR1, CDR2, and CDR3 of SEQ ID NO: 165; the CDR1, CDR2, and CDR3 of SEQ ID NO: 169, the CDR1, CDR2, and CDR3 of SEQ ID NO: 173, the CDR1, CDR2, and CDR3 of SEQ ID NO: 177, the CDR1, CDR2, and CDR3 of SEQ ID NO: 181, or the CDR1, CDR2, and CDR3 of SEQ ID NO: 185.

[0102] In some embodiments, the variable domain of the second light chain comprises the CDR1, CDR2, and CDR3 of SEQ ID NO: 54; the CDR1, CDR2, and CDR3 of SEQ ID NO: 58; the CDR1, CDR2, and CDR3 of SEQ ID NO: 70; the CDR1, CDR2, and CDR3 of SEQ ID NO: 74; the CDR1, CDR2, and CDR3 of SEQ ID NO: 78; the CDR1, CDR2, and CDR3 of SEQ ID NO: 82; the CDR1, CDR2, and CDR3 of SEQ ID NO: 86; the CDR1, CDR2, and CDR3 of SEQ ID NO: 90; the CDR1, CDR2, and CDR3 of SEQ ID NO: 94; the CDR1, CDR2, and CDR3 of SEQ ID NO: 98; the CDR1, CDR2, and CDR3 of SEQ ID NO: 102; the CDR1, CDR2, and CDR3 of SEQ ID NO: 106; the CDR1, CDR2, and CDR3 of SEQ ID NO: 110; the CDR1, CDR2, and CDR3 of SEQ ID NO: 118; the CDR1, CDR2, and CDR3 of SEQ ID NO: 122; the CDR1, CDR2, and CDR3 of SEQ ID NO: 126; the CDR1, CDR2, and CDR3 of SEQ ID NO: 130; the CDR1, CDR2, and CDR3 of SEQ ID NO: 134; the CDR1, CDR2, and CDR3 of SEQ ID NO: 142; the CDR1, CDR2, and CDR3 of SEQ ID NO: 146; the CDR1, CDR2, and CDR3 of SEQ ID NO: 150; the CDR1, CDR2, and CDR3 of SEQ ID NO: 154; the CDR1, CDR2, and CDR3 of SEQ ID NO: 158; the CDR1, CDR2, and CDR3 of SEQ ID NO: 162, the CDR1, CDR2, and CDR3 of SEQ ID NO: 166; the CDR1, CDR2, and CDR3 of SEQ ID NO: 170, the CDR1, CDR2, and CDR3 of SEQ ID NO: 174, the CDR1, CDR2, and CDR3 of SEQ ID NO: 178, the CDR1, CDR2, and CDR3 of SEQ ID NO: 182, or the CDR1, CDR2, and CDR3 of SEQ ID NO: 186.

[0103] In some embodiments, the molecule comprises SEQ ID NO: 51, SEQ ID NO: 52, SEQ ID NO: 53, and SEQ ID NO: 54. In some embodiments, the molecule comprises SEQ ID NO: 55, SEQ ID NO: 56, SEQ ID NO: 57, and SEQ ID NO: 58. In some embodiments, the molecule comprises SEQ ID NO: 67, SEQ ID NO: 68, SEQ ID NO: 69, and SEQ ID NO: 70. In some embodiments, the molecule comprises SEQ ID NO: 71, SEQ ID NO: 72, SEQ ID NO: 73, and SEQ ID NO: 74. In some embodiments, the molecule comprises SEQ ID NO: 75, SEQ ID NO: 76, SEQ ID NO: 77, and SEQ ID NO: 78. In some embodiments, the molecule comprises SEQ ID NO: 79, SEQ ID NO: 80, SEQ ID NO: 81, and SEQ ID NO: 82. In some embodiments, the molecule comprises SEQ ID NO: 83, SEQ ID NO: 84, SEQ ID NO: 85, and SEQ ID NO: 86. In some embodiments, the molecule comprises SEQ ID NO: 87, SEQ ID NO: 88, SEQ ID NO: 89, and SEQ ID NO: 90. In some embodiments, the molecule comprises SEQ ID NO: 91, SEQ ID NO: 92, SEQ ID NO: 93, and SEQ ID NO: 94. In some embodiments, the molecule comprises SEQ ID NO: 95, SEQ ID NO: 96, SEQ ID NO: 97, and SEQ ID NO: 98. In some embodiments, the molecule comprises SEQ ID NO: 99, SEQ ID NO: 100, SEQ ID NO: 101, and SEQ ID NO: 102. In some embodiments, the molecule comprises SEQ ID NO: 103, SEQ ID NO: 104, SEQ ID NO: 105, and SEQ ID NO: 106. In some embodiments, the molecule comprises SEQ ID NO: 107, SEQ ID NO: 108, SEQ ID NO: 109, and SEQ ID NO: 110. In some embodiments, the molecule comprises SEQ ID NO: 115, SEQ ID NO: 116, SEQ ID NO: 117, and SEQ ID NO: 118.

[0104] In some embodiments, the molecule comprises SEQ ID NO: 119, SEQ ID NO: 120, SEQ ID NO: 121, and SEQ ID NO: 122. In some embodiments, the molecule comprises SEQ ID NO: 123, SEQ ID NO: 124, SEQ ID NO: 125, and SEQ ID NO: 126. In some embodiments, the molecule comprises SEQ ID NO: 127, SEQ ID NO: 128, SEQ ID NO: 129, and SEQ ID NO: 130. In some embodiments, the molecule comprises SEQ ID NO: 131, SEQ ID NO: 132, SEQ ID NO: 133, and SEQ ID NO: 133. In some embodiments, the molecule comprises SEQ ID NO: 139, SEQ ID NO: 140, SEQ ID NO: 141, and SEQ ID NO: 142. In some embodiments, the molecule comprises SEQ ID NO: 143, SEQ ID NO: 144, SEQ ID NO: 145, and SEQ ID NO: 146. In some embodiments, the molecule comprises SEQ ID NO: 147, SEQ ID NO: 148, SEQ ID NO: 149, and SEQ ID NO: 150. In some embodiments, the molecule comprises SEQ ID NO: 151, SEQ ID NO: 152, SEQ ID NO: 153, and SEQ ID NO: 154. In some embodiments, the molecule comprises SEQ ID NO: 155, SEQ ID NO: 156, SEQ ID NO: 157, and SEQ ID NO: 158. In some embodiments, the molecule comprises SEQ ID NO: 159, SEQ ID NO: 160, SEQ ID NO: 161, and SEQ ID NO: 162. In some embodiments, the molecule comprises SEQ ID NO: 163, SEQ ID NO: 164, SEQ ID NO: 165, and SEQ ID NO: 166. In some embodiments, the molecule comprises SEQ ID NO: 167, SEQ ID NO: 168, SEQ ID NO: 169, and SEQ ID NO: 170. In some embodiments, the molecule comprises SEQ ID NO: 171, SEQ ID NO: 172, SEQ ID NO: 173, and SEQ ID NO: 174. In some embodiments, the molecule comprises SEQ ID NO: 175, SEQ ID NO: 176, SEQ ID NO: 177, and SEQ ID NO: 178. In some embodiments, the molecule comprises SEQ ID NO: 179, SEQ ID NO: 180, SEQ ID NO: 181, and SEQ ID NO: 182. In some embodiments, the molecule comprises SEQ ID NO: 183, SEQ ID NO: 184, SEQ ID NO: 185, and SEQ ID NO: 186.

[0105] In some embodiments, the molecule further comprises one or more disulfide bonds. In some embodiments, the molecule further comprises one or more linker sequences. In some embodiments, the molecule is capable of neutralizing a coronavirus. In some embodiments, the coronavirus is a SARS-CoV-2 virus. In some embodiments, the SARS-CoV-2 virus strain is selected from the group consisting of WA1, B.1.1.7, B1.526, B1.351, P1, B1.352, and B.1.427. In some embodiments, the molecule specifically recognizes a first epitope and a second epitope on a SARS-CoV-2 particle. In some embodiments, the first epitope comprises at least a portion of a receptor binding domain (RBD) on a spike protein of a SARS-CoV-2 particle. In some embodiments, the second epitope comprises at least a portion of a N-terminal domain (NTD) on a spike protein of a SARS-CoV-2 particle. In some embodiments, the composition is administered in combination with a second therapeutic agent.

[0106] In certain aspects, the invention provides a synthesized monoclonal antibody, or a functional fragment thereof, comprising a heavy chain having a variable domain and a constant domain and a light chain having a variable domain and a constant domain, wherein the antibody binds an antigen on a coronavirus particle.

[0107] In some embodiments, the heavy chain variable domain comprises a polypeptide sequence which is at least 60%, 62%, 65%, 67%, 70%, 72%, 75%, 77%, 80%, 82%, 85%, 87%, 90%, 92%, 95%, 97%, 98%, 99% identical to SEQ ID NO: 5. In some embodiments, the heavy chain variable domain comprises a polypeptide sequence which is at least 60%, 62%, 65%, 67%, 70%, 72%, 75%, 77%, 80%, 82%, 85%, 87%, 90%, 92%, 95%, 97%, 98%, 99% identical to SEQ ID NO: 41. In some embodiments, the heavy chain variable domain comprises a polypeptide sequence which is at least 60%, 62%, 65%, 67%, 70%, 72%, 75%, 77%, 80%, 82%, 85%, 87%, 90%, 92%, 95%, 97%, 98%, 99% identical to SEQ ID NO: 35. In some embodiments, the heavy chain variable domain comprises a polypeptide sequence which is at least 60%, 62%, 65%, 67%, 70%, 72%, 75%, 77%, 80%, 82%, 85%, 87%, 90%, 92%, 95%, 97%, 98%, 99% identical to SEQ ID NO: 1. In some embodiments, the heavy chain variable domain comprises a polypeptide sequence which is at least 60%, 62%, 65%, 67%, 70%, 72%, 75%, 77%, 80%, 82%, 85%, 87%, 90%, 92%, 95%, 97%, 98%, 99% identical to SEQ ID NO: 23. In some embodiments, the heavy chain variable domain comprises a polypeptide sequence which is at least 60%, 62%, 65%, 67%, 70%, 72%, 75%, 77%, 80%, 82%, 85%, 87%, 90%, 92%, 95%, 97%, 98%, 99% identical to SEQ ID NO: 13.

[0108] In some embodiments, the heavy chain variable domain comprises a polypeptide sequence which is at least 60%, 62%, 65%, 67%, 70%, 72%, 75%, 77%, 80%, 82%, 85%, 87%, 90%, 92%, 95%, 97%, 98%, 99% identical to SEQ ID NO: 27. In some embodiments, the light chain variable domain comprises a polypeptide sequence which is at least 60%, 62%, 65%, 67%, 70%, 72%, 75%, 77%, 80%, 82%, 85%, 87%, 90%, 92%, 95%, 97%, 98%, 99% identical to SEQ ID NO: 6. In some embodiments, the light chain variable domain comprises a polypeptide sequence which is at least 60%, 62%, 65%, 67%, 70%, 72%, 75%, 77%, 80%, 82%, 85%, 87%, 90%, 92%, 95%, 97%, 98%, 99% identical to SEQ ID NO: 42. In some embodiments, the light chain variable domain comprises a polypeptide sequence which is at least 60%, 62%, 65%, 67%, 70%, 72%, 75%, 77%, 80%, 82%, 85%, 87%, 90%, 92%, 95%, 97%, 98%, 99% identical to SEQ ID NO: 36. In some embodiments, the light chain variable domain comprises a polypeptide sequence which is at least 60%, 62%, 65%, 67%, 70%, 72%, 75%, 77%, 80%, 82%, 85%, 87%, 90%, 92%, 95%, 97%, 98%, 99% identical to SEQ ID NO: 2.

[0109] In some embodiments, the light chain variable domain comprises a polypeptide sequence which is at least 60%, 62%, 65%, 67%, 70%, 72%, 75%, 77%, 80%, 82%, 85%, 87%, 90%, 92%, 95%, 97%, 98%, 99% identical to SEQ ID NO: 24. In some embodiments, the light chain variable domain comprises a polypeptide sequence which is at least 60%, 62%, 65%, 67%, 70%, 72%, 75%, 77%, 80%, 82%, 85%, 87%, 90%, 92%, 95%, 97%, 98%, 99% identical to SEQ ID NO: 14. In some embodiments, the light chain variable domain comprises a polypeptide sequence which is at least 60%, 62%, 65%, 67%, 70%, 72%, 75%, 77%, 80%, 82%, 85%, 87%, 90%, 92%, 95%, 97%, 98%, 99% identical to SEQ ID NO: 28.

[0110] In some embodiments, the heavy chain variable domain comprises a polypeptide sequence which is at least 60%, 62%, 65%, 67%, 70%, 72%, 75%, 77%, 80%, 82%, 85%, 87%, 90%, 92%, 95%, 97%, 98%, 99% identical to SEQ ID NO: 5 and the light chain variable domain comprises a polypeptide sequence which is at least 60%, 62%, 65%, 67%, 70%, 72%, 75%, 77%, 80%, 82%, 85%, 87%, 90%, 92%, 95%, 97%, 98%, 99% identical to SEQ ID NO: 6. In some embodiments, the heavy chain variable domain comprises a polypeptide sequence which is at least 60%, 62%, 65%, 67%, 70%, 72%, 75%, 77%, 80%, 82%, 85%, 87%, 90%, 92%, 95%, 97%, 98%, 99% identical to SEQ ID NO: 41 and the light chain variable domain comprises a polypeptide sequence which is at least 60%, 62%, 65%, 67%, 70%, 72%, 75%, 77%, 80%, 82%, 85%, 87%, 90%, 92%, 95%, 97%, 98%, 99% identical to SEQ ID NO: 42. In some embodiments, the heavy chain variable domain comprises a polypeptide sequence which is at least 60%, 62%, 65%, 67%, 70%, 72%, 75%, 77%, 80%, 82%, 85%, 87%, 90%, 92%, 95%, 97%, 98%, 99% identical to SEQ ID NO: 35 and the light chain variable domain comprises a polypeptide sequence which is at least 60%, 62%, 65%, 67%, 70%, 72%, 75%, 77%, 80%, 82%, 85%, 87%, 90%, 92%, 95%, 97%, 98%, 99% identical to SEQ ID NO: 36.

[0111] In some embodiments, the heavy chain variable domain comprises a polypeptide sequence which is at least 60%, 62%, 65%, 67%, 70%, 72%, 75%, 77%, 80%, 82%, 85%, 87%, 90%, 92%, 95%, 97%, 98%, 99% identical to SEQ ID NO: 1 and the light chain variable domain comprises a polypeptide sequence which is at least 60%, 62%, 65%, 67%, 70%, 72%, 75%, 77%, 80%, 82%, 85%, 87%, 90%, 92%, 95%, 97%, 98%, 99% identical to SEQ ID NO: 2. In some embodiments, the heavy chain variable domain comprises a polypeptide sequence which is at least 60%, 62%, 65%, 67%, 70%, 72%, 75%, 77%, 80%, 82%, 85%, 87%, 90%, 92%, 95%, 97%, 98%, 99% identical to SEQ ID NO: 23 and the light chain variable domain comprises a polypeptide sequence which is at least 60%, 62%, 65%, 67%, 70%, 72%, 75%, 77%, 80%, 82%, 85%, 87%, 90%, 92%, 95%, 97%, 98%, 99% identical to SEQ ID NO: 24. In some embodiments, the heavy chain variable domain comprises a polypeptide sequence which is at least 60%, 62%, 65%, 67%, 70%, 72%, 75%, 77%, 80%, 82%, 85%, 87%, 90%, 92%, 95%, 97%, 98%, 99% identical to SEQ ID NO: 13 and the light chain variable domain comprises a polypeptide sequence which is at least 60%, 62%, 65%, 67%, 70%, 72%, 75%, 77%, 80%, 82%, 85%, 87%, 90%, 92%, 95%, 97%, 98%, 99% identical to SEQ ID NO: 14. In some embodiments, the heavy chain variable domain comprises a polypeptide sequence which is at least 60%, 62%, 65%, 67%, 70%, 72%, 75%, 77%, 80%, 82%, 85%, 87%, 90%, 92%, 95%, 97%, 98%, 99% identical to SEQ ID NO: 27 and the light chain variable domain comprises a polypeptide sequence which is at least 60%, 62%, 65%, 67%, 70%, 72%, 75%, 77%, 80%, 82%, 85%, 87%, 90%, 92%, 95%, 97%, 98%, 99% identical to SEQ ID NO: 28.

[0112] In some embodiments, the heavy chain variable domain comprises SEQ ID NO: 5 and the light chain variable domain comprises SEQ ID NO: 6. In some embodiments, the heavy chain variable domain comprises SEQ ID NO: 41 and the light chain variable domain comprises SEQ ID NO: 42. In some embodiments, the heavy chain variable domain comprises SEQ ID NO: 35 and the light chain variable domain comprises SEQ ID NO: 36. In some embodiments, the heavy chain variable domain comprises SEQ ID NO: 1 and the light chain variable domain comprises SEQ ID NO: 2. In some embodiments, the heavy chain variable domain comprises SEQ ID NO: 23 and the light chain variable domain comprises SEQ ID NO: 24. In some embodiments, the heavy chain variable domain comprises SEQ ID NO: 13 and the light chain variable domain comprises SEQ ID NO: 14. In some embodiments, the heavy chain variable domain comprises SEQ ID NO: 27 and the light chain variable domain comprises SEQ ID NO: 28. In some embodiments, the heavy chain variable domain comprises the CDR1, CDR2, and CDR3 regions of SEQ ID NO: 5. In some embodiments, the heavy chain variable domain comprises the CDR1, CDR2, and CDR3 regions of SEQ ID NO: 41. In some embodiments, the heavy chain variable domain comprises the CDR1, CDR2, and CDR3 regions of SEQ ID NO: 1.

[0113] In some embodiments, the heavy chain variable domain comprises the CDR1, CDR2, and CDR3 regions of SEQ ID NO: 23. In some embodiments, the heavy chain variable domain comprises the CDR1, CDR2, and CDR3 regions of SEQ ID NO: 13. In some embodiments, the heavy chain variable domain comprises the CDR1, CDR2, and CDR3 regions of SEQ ID NO: 27.

[0114] In some embodiments, the light chain variable domain comprises the CDR1, CDR2, and CDR3 regions of SEQ ID NO: 6. In some embodiments, the light chain variable domain comprises the CDR1, CDR2, and CDR3 regions of SEQ ID NO: 42. In some embodiments, the light chain variable domain comprises the CDR1, CDR2, and CDR3 regions of SEQ ID NO: 36. In some embodiments, the light chain variable domain comprises the CDR1, CDR2, and CDR3 regions of SEQ ID NO: 2. In some embodiments, the light chain variable domain comprises the CDR1, CDR2, and CDR3 regions of SEQ ID NO: 24. In some embodiments, the light chain variable domain comprises the CDR1, CDR2, and CDR3 regions of SEQ ID NO: 14. In some embodiments, the light chain variable domain comprises the CDR1, CDR2, and CDR3 regions of SEQ ID NO: 28. In some embodiments, the heavy chain variable domain comprises the CDR1, CDR2, and CDR3 regions of SEQ ID NO: 5 and the light chain variable domain comprises the CDR1, CDR2, and CDR3 regions of SEQ ID NO: 6. In some embodiments, the heavy chain variable domain comprises the CDR1, CDR2, and CDR3 regions of SEQ ID NO: 41 and the light chain variable domain comprises the CDR1, CDR2, and CDR3 regions of SEQ ID NO: 42. In some embodiments, the heavy chain variable domain comprises the CDR1, CDR2, and CDR3 regions of SEQ ID NO: 35 and the light chain variable domain comprises the CDR1, CDR2, and CDR3 regions of SEQ ID NO: 36. In some embodiments, the heavy chain variable domain comprises the CDR1, CDR2, and CDR3 regions of SEQ ID NO: 1 and the light chain variable domain comprises the CDR1, CDR2, and CDR3 regions of SEQ ID NO: 2.

[0115] In some embodiments, the heavy chain variable domain comprises the CDR1, CDR2, and CDR3 regions of SEQ ID NO: 23 and the light chain variable domain comprises the CDR1, CDR2, and CDR3 regions of SEQ ID NO: 24. In some embodiments, the heavy chain variable domain comprises the CDR1, CDR2, and CDR3 regions of SEQ ID NO: 13 and the light chain variable domain comprises the CDR1, CDR2, and CDR3 regions of SEQ ID NO: 14. In some embodiments, the heavy chain variable domain comprises the CDR1, CDR2, and CDR3 regions of SEQ ID NO: 27 and the light chain variable domain comprises the CDR1, CDR2, and CDR3 regions of SEQ ID NO: 28.

[0116] In some embodiments, the antibody neutralizes a coronavirus. In some embodiments, the coronavirus is a SARS-CoV-2 virus. In some embodiments, the coronavirus is a SARS-CoV-2 variant strain. In some embodiments, the variant strain is selected from the group consisting of WA1, B.1.1.7, B1.526, B1.351, P1, B1.352, and B.1.427. In some embodiments, the antibody specifically binds an epitope on the surface of the coronavirus. In some embodiments, the epitope comprises at least a portion of a coronavirus spike protein. In some embodiments, the at least a portion of a coronavirus spike protein comprises a receptor binding domain (RBD) of a spike protein. In some embodiments, the at least a portion of a coronavirus spike protein comprises a N-Terminal domain (NTD) of a spike protein. In some embodiments, the coronavirus is a SARS-CoV-2 coronavirus.

[0117] In certain aspects, the invention provides a method of treating or preventing a COVID-19 infection in a subject in need thereof, the method comprising administering to the subject a therapeutically effective amount of a synthesized monoclonal antibody, or a functional fragment thereof, comprising a heavy chain having a variable domain and a constant domain and a light chain having a variable domain and a constant domain, wherein the antibody binds an antigen on a coronavirus particle.

[0118] In some embodiments, the heavy chain variable domain comprises a polypeptide sequence which is at least 60%, 62%, 65%, 67%, 70%, 72%, 75%, 77%, 80%, 82%, 85%, 87%, 90%, 92%, 95%, 97%, 98%, 99% identical to SEQ ID NO: 5. In some embodiments, the heavy chain variable domain comprises a polypeptide sequence which is at least 60%, 62%, 65%, 67%, 70%, 72%, 75%, 77%, 80%, 82%, 85%, 87%, 90%, 92%, 95%, 97%, 98%, 99% identical to SEQ ID NO: 41. In some embodiments, the heavy chain variable domain comprises a polypeptide sequence which is at least 60%, 62%, 65%, 67%, 70%, 72%, 75%, 77%, 80%, 82%, 85%, 87%, 90%, 92%, 95%, 97%, 98%, 99% identical to SEQ ID NO: 35. In some embodiments, the heavy chain variable domain comprises a polypeptide sequence which is at least 60%, 62%, 65%, 67%, 70%, 72%, 75%, 77%, 80%, 82%, 85%, 87%, 90%, 92%, 95%, 97%, 98%, 99% identical to SEQ ID NO: 1. In some embodiments, the heavy chain variable domain comprises a polypeptide sequence which is at least 60%, 62%, 65%, 67%, 70%, 72%, 75%, 77%, 80%, 82%, 85%, 87%, 90%, 92%, 95%, 97%, 98%, 99% identical to SEQ ID NO: 23. In some embodiments, the heavy chain variable domain comprises a polypeptide sequence which is at least 60%, 62%, 65%, 67%, 70%, 72%, 75%, 77%, 80%, 82%, 85%, 87%, 90%, 92%, 95%, 97%, 98%, 99% identical to SEQ ID NO: 13. In some embodiments, the heavy chain variable domain comprises a polypeptide sequence which is at least 60%, 62%, 65%, 67%, 70%, 72%, 75%, 77%, 80%, 82%, 85%, 87%, 90%, 92%, 95%, 97%, 98%, 99% identical to SEQ ID NO: 27. In some embodiments, the light chain variable domain comprises a polypeptide sequence which is at least 60%, 62%, 65%, 67%, 70%, 72%, 75%, 77%, 80%, 82%, 85%, 87%, 90%, 92%, 95%, 97%, 98%, 99% identical to SEQ ID NO: 6.

[0119] In some embodiments, the light chain variable domain comprises a polypeptide sequence which is at least 60%, 62%, 65%, 67%, 70%, 72%, 75%, 77%, 80%, 82%, 85%, 87%, 90%, 92%, 95%, 97%, 98%, 99% identical to SEQ ID NO: 42. In some embodiments, the light chain variable domain comprises a polypeptide sequence which is at least 60%, 62%, 65%, 67%, 70%, 72%, 75%, 77%, 80%, 82%, 85%, 87%, 90%, 92%, 95%, 97%, 98%, 99% identical to SEQ ID NO: 36. In some embodiments, the light chain variable domain comprises a polypeptide sequence which is at least 60%, 62%, 65%, 67%, 70%, 72%, 75%, 77%, 80%, 82%, 85%, 87%, 90%, 92%, 95%, 97%, 98%, 99% identical to SEQ ID NO: 2. In some embodiments, the light chain variable domain comprises a polypeptide sequence which is at least 60%, 62%, 65%, 67%, 70%, 72%, 75%, 77%, 80%, 82%, 85%, 87%, 90%, 92%, 95%, 97%, 98%, 99% identical to SEQ ID NO: 24. In some embodiments, the light chain variable domain comprises a polypeptide sequence which is at least 60%, 62%, 65%, 67%, 70%, 72%, 75%, 77%, 80%, 82%, 85%, 87%, 90%, 92%, 95%, 97%, 98%, 99% identical to SEQ ID NO: 14. In some embodiments, the light chain variable domain comprises a polypeptide sequence which is at least 60%, 62%, 65%, 67%, 70%, 72%, 75%, 77%, 80%, 82%, 85%, 87%, 90%, 92%, 95%, 97%, 98%, 99% identical to SEQ ID NO: 28.

[0120] In some embodiments, the heavy chain variable domain comprises a polypeptide sequence which is at least 60%, 62%, 65%, 67%, 70%, 72%, 75%, 77%, 80%, 82%, 85%, 87%, 90%, 92%, 95%, 97%, 98%, 99% identical to SEQ ID NO: 5 and the light chain variable domain comprises a polypeptide sequence which is at least 60%, 62%, 65%, 67%, 70%, 72%, 75%, 77%, 80%, 82%, 85%, 87%, 90%, 92%, 95%, 97%, 98%, 99% identical to SEQ ID NO: 6. In some embodiments, the heavy chain variable domain comprises a polypeptide sequence which is at least 60%, 62%, 65%, 67%, 70%, 72%, 75%, 77%, 80%, 82%, 85%, 87%, 90%, 92%, 95%, 97%, 98%, 99% identical to SEQ ID NO: 41 and the light chain variable domain comprises a polypeptide sequence which is at least 60%, 62%, 65%, 67%, 70%, 72%, 75%, 77%, 80%, 82%, 85%, 87%, 90%, 92%, 95%, 97%, 98%, 99% identical to SEQ ID NO: 42. In some embodiments, the heavy chain variable domain comprises a polypeptide sequence which is at least 60%, 62%, 65%, 67%, 70%, 72%, 75%, 77%, 80%, 82%, 85%, 87%, 90%, 92%, 95%, 97%, 98%, 99% identical to SEQ ID NO: 35 and the light chain variable domain comprises a polypeptide sequence which is at least 60%, 62%, 65%, 67%, 70%, 72%, 75%, 77%, 80%, 82%, 85%, 87%, 90%, 92%, 95%, 97%, 98%, 99% identical to SEQ ID NO: 36. In some embodiments, the heavy chain variable domain comprises a polypeptide sequence which is at least 60%, 62%, 65%, 67%, 70%, 72%, 75%, 77%, 80%, 82%, 85%, 87%, 90%, 92%, 95%, 97%, 98%, 99% identical to SEQ ID NO: 1 and the light chain variable domain comprises a polypeptide sequence which is at least 60%, 62%, 65%, 67%, 70%, 72%, 75%, 77%, 80%, 82%, 85%, 87%, 90%, 92%, 95%, 97%, 98%, 99% identical to SEQ ID NO: 2. In some embodiments, the heavy chain variable domain comprises a polypeptide sequence which is at least 60%, 62%, 65%, 67%, 70%, 72%, 75%, 77%, 80%, 82%, 85%, 87%, 90%, 92%, 95%, 97%, 98%, 99% identical to SEQ ID NO: 23 and the light chain variable domain comprises a polypeptide sequence which is at least 60%, 62%, 65%, 67%, 70%, 72%, 75%, 77%, 80%, 82%, 85%, 87%, 90%, 92%, 95%, 97%, 98%, 99% identical to SEQ ID NO: 24.

[0121] In some embodiments, the heavy chain variable domain comprises a polypeptide sequence which is at least 60%, 62%, 65%, 67%, 70%, 72%, 75%, 77%, 80%, 82%, 85%, 87%, 90%, 92%, 95%, 97%, 98%, 99% identical to SEQ ID NO: 13 and the light chain variable domain comprises a polypeptide sequence which is at least 60%, 62%, 65%, 67%, 70%, 72%, 75%, 77%, 80%, 82%, 85%, 87%, 90%, 92%, 95%, 97%, 98%, 99% identical to SEQ ID NO: 14. In some embodiments, the heavy chain variable domain comprises a polypeptide sequence which is at least 60%, 62%, 65%, 67%, 70%, 72%, 75%, 77%, 80%, 82%, 85%, 87%, 90%, 92%, 95%, 97%, 98%, 99% identical to SEQ ID NO: 27 and the light chain variable domain comprises a polypeptide sequence which is at least 60%, 62%, 65%, 67%, 70%, 72%, 75%, 77%, 80%, 82%, 85%, 87%, 90%, 92%, 95%, 97%, 98%, 99% identical to SEQ ID NO: 28.

[0122] In some embodiments, the heavy chain variable domain comprises SEQ ID NO: 5 and the light chain variable domain comprises SEQ ID NO: 6. In some embodiments, the heavy chain variable domain comprises SEQ ID NO: 41 and the light chain variable domain comprises SEQ ID NO: 42. In some embodiments, the heavy chain variable domain comprises SEQ ID NO: 35 and the light chain variable domain comprises SEQ ID NO: 36. In some embodiments, the heavy chain variable domain comprises SEQ ID NO: 1 and the light chain variable domain comprises SEQ ID NO: 2. In some embodiments, the heavy chain variable domain comprises SEQ ID NO: 23 and the light chain variable domain comprises SEQ ID NO: 24. In some embodiments, the heavy chain variable domain comprises SEQ ID NO: 13 and the light chain variable domain comprises SEQ ID NO: 14.

[0123] In some embodiments, the heavy chain variable domain comprises SEQ ID NO: 27 and the light chain variable domain comprises SEQ ID NO: 28. In some embodiments, the heavy chain variable domain comprises the CDR1, CDR2, and CDR3 regions of SEQ ID NO: 5. In some embodiments, the heavy chain variable domain comprises the CDR1, CDR2, and CDR3 regions of SEQ ID NO: 41. In some embodiments, the heavy chain variable domain comprises the CDR1, CDR2, and CDR3 regions of SEQ ID NO: 1. In some embodiments, the heavy chain variable domain comprises the CDR1, CDR2, and CDR3 regions of SEQ ID NO: 23. In some embodiments, the heavy chain variable domain comprises the CDR1, CDR2, and CDR3 regions of SEQ ID NO: 13. In some embodiments, the heavy chain variable domain comprises the CDR1, CDR2, and CDR3 regions of SEQ ID NO: 27. In some embodiments, the light chain variable domain comprises the CDR1, CDR2, and CDR3 regions of SEQ ID NO: 6. In some embodiments, the light chain variable domain comprises the CDR1, CDR2, and CDR3 regions of SEQ ID NO: 42. In some embodiments, the light chain variable domain comprises the CDR1, CDR2, and CDR3 regions of SEQ ID NO: 36. In some embodiments, the light chain variable domain comprises the CDR1, CDR2, and CDR3 regions of SEQ ID NO: 2. In some embodiments, the light chain variable domain comprises the CDR1, CDR2, and CDR3 regions of SEQ ID NO: 24.

[0124] In some embodiments, the light chain variable domain comprises the CDR1, CDR2, and CDR3 regions of SEQ ID NO: 14. In some embodiments, the light chain variable domain comprises the CDR1, CDR2, and CDR3 regions of SEQ ID NO: 28. In some embodiments, the heavy chain variable domain comprises the CDR1, CDR2, and CDR3 regions of SEQ ID NO: 5 and the light chain variable domain comprises the CDR1, CDR2, and CDR3 regions of SEQ ID NO: 6. In some embodiments, the heavy chain variable domain comprises the CDR1, CDR2, and CDR3 regions of SEQ ID NO: 41 and the light chain variable domain comprises the CDR1, CDR2, and CDR3 regions of SEQ ID NO: 42. In some embodiments, the heavy chain variable domain comprises the CDR1, CDR2, and CDR3 regions of SEQ ID NO: 35 and the light chain variable domain comprises the CDR1, CDR2, and CDR3 regions of SEQ ID NO: 36. In some embodiments, the heavy chain variable domain comprises the CDR1, CDR2, and CDR3 regions of SEQ ID NO: 1 and the light chain variable domain comprises the CDR1, CDR2, and CDR3 regions of SEQ ID NO: 2. In some embodiments, the heavy chain variable domain comprises the CDR1, CDR2, and CDR3 regions of SEQ ID NO: 23 and the light chain variable domain comprises the CDR1, CDR2, and CDR3 regions of SEQ ID NO: 24. In some embodiments, the heavy chain variable domain comprises the CDR1, CDR2, and CDR3 regions of SEQ ID NO: 13 and the light chain variable domain comprises the CDR1, CDR2, and CDR3 regions of SEQ ID NO: 14. In some embodiments, the heavy chain variable domain comprises the CDR1, CDR2, and CDR3 regions of SEQ ID NO: 27 and the light chain variable domain comprises the CDR1, CDR2, and CDR3 regions of SEQ ID NO: 28.

[0125] In some embodiments, the antibody neutralizes a coronavirus. In some embodiments, the coronavirus is a SARS-CoV-2 virus. In some embodiments, the coronavirus is a SARS-CoV-2 variant strain. In some embodiments, the variant strain is selected from the group consisting of WA1, B.1.1.7, B1.526, B1.351, P1, B1.352, and B.1.427. In some embodiments, the antibody specifically binds an epitope on the surface of the coronavirus. In some embodiments, the epitope comprises at least a portion of a coronavirus spike protein. In some embodiments, the at least a portion of a coronavirus spike protein comprises a receptor binding domain (RBD) of a spike protein. In some embodiments, the at least a portion of a coronavirus spike protein comprises a N-Terminal domain (NTD) of a spike protein. In some embodiments, the coronavirus is a SARS-CoV-2 coronavirus. In some embodiments, the antibody is administered in combination with a second pharmaceutical agent.

[0126] In certain aspects, the invention provides a bispecific molecule comprising a first polypeptide chain and a second polypeptide chain, wherein: the first polypeptide chain comprises: a first light chain comprising a variable domain and a constant domain; a first heavy chain comprising a variable domain and a constant domain; the second polypeptide chain comprises: a second light chain comprising a variable domain and a constant domain; and a second heavy chain comprising a variable domain and a constant domain. In some embodiments, the first polypeptide chain and the second polypeptide chain are covalently bonded to one another.

[0127] In some embodiments, the first heavy chain comprises a polypeptide sequence which is at least 60%, 62%, 65%, 67%, 70%, 72%, 75%, 77%, 80%, 82%, 85%, 87%, 90%, 92%, 95%, 97%, 98%, 99% identical to SEQ ID NO: 47, a polypeptide sequence which is at least 60%, 62%, 65%, 67%, 70%, 72%, 75%, 77%, 80%, 82%, 85%, 87%, 90%, 92%, 95%, 97%, 98%, 99% identical to SEQ ID NO: 111, a polypeptide sequence which is at least 60%, 62%, 65%, 67%, 70%, 72%, 75%, 77%, 80%, 82%, 85%, 87%, 90%, 92%, 95%, 97%, 98%, 99% identical to SEQ ID NO: 135, a polypeptide sequence which is at least 60%, 62%, 65%, 67%, 70%, 72%, 75%, 77%, 80%, 82%, 85%, 87%, 90%, 92%, 95%, 97%, 98%, 99% identical to SEQ ID NO: 187, or a polypeptide sequence which is at least 60%, 62%, 65%, 67%, 70%, 72%, 75%, 77%, 80%, 82%, 85%, 87%, 90%, 92%, 95%, 97%, 98%, 99% identical to SEQ ID NO: 211. In some embodiments, the first light chain comprises a polypeptide sequence which is at least 60%, 62%, 65%, 67%, 70%, 72%, 75%, 77%, 80%, 82%, 85%, 87%, 90%, 92%, 95%, 97%, 98%, 99% identical to SEQ ID NO: 48, a polypeptide sequence which is at least 60%, 62%, 65%, 67%, 70%, 72%, 75%, 77%, 80%, 82%, 85%, 87%, 90%, 92%, 95%, 97%, 98%, 99% identical to SEQ ID NO: 112, a polypeptide sequence which is at least 60%, 62%, 65%, 67%, 70%, 72%, 75%, 77%, 80%, 82%, 85%, 87%, 90%, 92%, 95%, 97%, 98%, 99% identical to SEQ ID NO: 136, a polypeptide sequence which is at least 60%, 62%, 65%, 67%, 70%, 72%, 75%, 77%, 80%, 82%, 85%, 87%, 90%, 92%, 95%, 97%, 98%, 99% identical to SEQ ID NO: 188, or a polypeptide sequence which is at least 60%, 62%, 65%, 67%, 70%, 72%, 75%, 77%, 80%, 82%, 85%, 87%, 90%, 92%, 95%, 97%, 98%, 99% identical to SEQ ID NO: 212.

[0128] In some embodiments, the second heavy chain comprises a polypeptide sequence which is at least 60%, 62%, 65%, 67%, 70%, 72%, 75%, 77%, 80%, 82%, 85%, 87%, 90%, 92%, 95%, 97%, 98%, 99% identical to SEQ ID NO: 49, a polypeptide sequence which is at least 60%, 62%, 65%, 67%, 70%, 72%, 75%, 77%, 80%, 82%, 85%, 87%, 90%, 92%, 95%, 97%, 98%, 99% identical to SEQ ID NO: 113, a polypeptide sequence which is at least 60%, 62%, 65%, 67%, 70%, 72%, 75%, 77%, 80%, 82%, 85%, 87%, 90%, 92%, 95%, 97%, 98%, 99% identical to SEQ ID NO: 137, a polypeptide sequence which is at least 60%, 62%, 65%, 67%, 70%, 72%, 75%, 77%, 80%, 82%, 85%, 87%, 90%, 92%, 95%, 97%, 98%, 99% identical to SEQ ID NO: 189, or a polypeptide sequence which is at least 60%, 62%, 65%, 67%, 70%, 72%, 75%, 77%, 80%, 82%, 85%, 87%, 90%, 92%, 95%, 97%, 98%, 99% identical to SEQ ID NO: 213. In some embodiments, the second light chain comprises a polypeptide sequence which is at least 60%, 62%, 65%, 67%, 70%, 72%, 75%, 77%, 80%, 82%, 85%, 87%, 90%, 92%, 95%, 97%, 98%, 99% identical to SEQ ID NO: 50, a polypeptide sequence which is at least 60%, 62%, 65%, 67%, 70%, 72%, 75%, 77%, 80%, 82%, 85%, 87%, 90%, 92%, 95%, 97%, 98%, 99% identical to SEQ ID NO: 114, a polypeptide sequence which is at least 60%, 62%, 65%, 67%, 70%, 72%, 75%, 77%, 80%, 82%, 85%, 87%, 90%, 92%, 95%, 97%, 98%, 99% identical to SEQ ID NO: 138, a polypeptide sequence which is at least 60%, 62%, 65%, 67%, 70%, 72%, 75%, 77%, 80%, 82%, 85%, 87%, 90%, 92%, 95%, 97%, 98%, 99% identical to SEQ ID NO: 190, or a polypeptide sequence which is at least 60%, 62%, 65%, 67%, 70%, 72%, 75%, 77%, 80%, 82%, 85%, 87%, 90%, 92%, 95%, 97%, 98%, 99% identical to SEQ ID NO: 214. In some embodiments, the variable domain of the first heavy chain comprises a polypeptide sequence which is at least 60%, 62%, 65%, 67%, 70%, 72%, 75%, 77%, 80%, 82%, 85%, 87%, 90%, 92%, 95%, 97%, 98%, 99% identical to SEQ ID NO: 35, a polypeptide sequence which is at least 60%, 62%, 65%, 67%, 70%, 72%, 75%, 77%, 80%, 82%, 85%, 87%, 90%, 92%, 95%, 97%, 98%, 99% identical to SEQ ID NO: 13.

[0129] In some embodiments, the variable domain of the first light chain comprises a polypeptide sequence which is at least 60%, 62%, 65%, 67%, 70%, 72%, 75%, 77%, 80%, 82%, 85%, 87%, 90%, 92%, 95%, 97%, 98%, 99% identical to SEQ ID NO: 36, a polypeptide sequence which is at least 60%, 62%, 65%, 67%, 70%, 72%, 75%, 77%, 80%, 82%, 85%, 87%, 90%, 92%, 95%, 97%, 98%, 99% identical to SEQ ID NO: 14. In some embodiments, the variable domain of the second heavy chain comprises a polypeptide sequence which is at least 60%, 62%, 65%, 67%, 70%, 72%, 75%, 77%, 80%, 82%, 85%, 87%, 90%, 92%, 95%, 97%, 98%, 99% identical to SEQ ID NO: 13, a polypeptide sequence which is at least 60%, 62%, 65%, 67%, 70%, 72%, 75%, 77%, 80%, 82%, 85%, 87%, 90%, 92%, 95%, 97%, 98%, 99% identical to SEQ ID NO: 45, a polypeptide sequence which is at least 60%, 62%, 65%, 67%, 70%, 72%, 75%, 77%, 80%, 82%, 85%, 87%, 90%, 92%, 95%, 97%, 98%, 99% identical to SEQ ID NO: 43. In some embodiments, the variable domain of the second light chain comprises a polypeptide sequence which is at least 60%, 62%, 65%, 67%, 70%, 72%, 75%, 77%, 80%, 82%, 85%, 87%, 90%, 92%, 95%, 97%, 98%, 99% identical to SEQ ID NO: 14, a polypeptide sequence which is at least 60%, 62%, 65%, 67%, 70%, 72%, 75%, 77%, 80%, 82%, 85%, 87%, 90%, 92%, 95%, 97%, 98%, 99% identical to SEQ ID NO: 46, a polypeptide sequence which is at least 60%, 62%, 65%, 67%, 70%, 72%, 75%, 77%, 80%, 82%, 85%, 87%, 90%, 92%, 95%, 97%, 98%, 99% identical to SEQ ID NO: 44.

[0130] In some embodiments, the variable domain of the first heavy chain comprises CDR1, CDR2, and CDR3 of SEQ ID NO: 47; CDR1, CDR2, and CDR3 of SEQ ID NO: 111; CDR1, CDR2, and CDR3 of SEQ ID NO: 135; CDR1, CDR2, and CDR3 of SEQ ID NO: 187; or CDR1, CDR2, and CDR3 of SEQ ID NO: 211. In some embodiments, the variable domain of the first light chain comprises CDR1, CDR2, and CDR3 of SEQ ID NO: 48, CDR1, CDR2, and CDR3 of SEQ ID NO: 112; CDR1, CDR2, and CDR3 of SEQ ID NO: 136; CDR1, CDR2, and CDR3 of SEQ ID NO: 188; or CDR1, CDR2, and CDR3 of SEQ ID NO: 212. In some embodiments, the variable domain of the second heavy chain comprises CDR1, CDR2, and CDR3 of SEQ ID NO: 49, CDR1, CDR2, and CDR3 of SEQ ID NO: 113; CDR1, CDR2, and CDR3 of SEQ ID NO: 137; CDR1, CDR2, and CDR3 of SEQ ID NO: 189; or CDR1, CDR2, and CDR3 of SEQ ID NO: 213. In some embodiments, the variable domain of the second light chain comprises CDR1, CDR2, and CDR3 SEQ ID NO: 50, CDR1, CDR2, and CDR3 of SEQ ID NO: 114; CDR1, CDR2, and CDR3 of SEQ ID NO: 138; CDR1, CDR2, and CDR3 of SEQ ID NO: 190; or CDR1, CDR2, and CDR3 of SEQ ID NO: 214.

[0131] In some embodiments, the molecule comprises SEQ ID NO: 47, SEQ ID NO: 48, SEQ ID NO: 49, and SEQ ID NO: 50. In some embodiments, the molecule comprises SEQ ID NO:111, SEQ ID NO: 112, SEQ ID NO: 113, and SEQ ID NO: 114. In some embodiments, the molecule comprises SEQ ID NO: 135, SEQ ID NO: 135, SEQ ID NO: 137, and SEQ ID NO: 138. In some embodiments, the molecule comprises SEQ ID NO: 187, SEQ ID NO: 188, SEQ ID NO: 189, and SEQ ID NO: 190. In some embodiments, the molecule comprises SEQ ID NO: 211, SEQ ID NO: 212, SEQ ID NO: 213, and SEQ ID NO: 214.

[0132] In some embodiments, the molecule further comprises one or more disulfide bonds. In some embodiments, the molecule further comprises one or more linker sequences. In some embodiments, the molecule is capable of neutralizing a coronavirus. In some embodiments, the coronavirus is a SARS-CoV-2 virus. In some embodiments, the SARS-CoV-2 virus strain is selected from the group consisting of WA1, B.1.1.7, B1.526, B1.351, P1, B1.352, and B.1.427. In some embodiments, the molecule specifically recognizes a first epitope and a second epitope on a SARS-CoV-2 particle. In some embodiments, the first epitope comprises at least a portion of a receptor binding domain (RBD) on a spike protein of a SARS-CoV-2 particle. In some embodiments, the second epitope comprises at least a portion of a N-terminal domain (NTD) on a spike protein of a SARS-CoV-2 particle.

[0133] In certain aspects, the invention provides a method of treating or preventing a COVID-19 infection in a subject in need thereof, the method comprising administering to the subject a composition comprising a bispecific molecule comprising a first polypeptide chain and a second polypeptide chain, wherein: the first polypeptide chain comprises: a first light chain comprising a variable domain and a constant domain; a first heavy chain comprising a variable domain and a constant domain; the second polypeptide chain comprises: a second light chain comprising a variable domain and a constant domain; and a second heavy chain comprising a variable domain and a constant domain. In some embodiments, the first polypeptide chain and the second polypeptide chain are covalently bonded to one another.

[0134] In some embodiments, the first heavy chain comprises a polypeptide sequence which is at least 60%, 62%, 65%, 67%, 70%, 72%, 75%, 77%, 80%, 82%, 85%, 87%, 90%, 92%, 95%, 97%, 98%, 99% identical to SEQ ID NO: 47, a polypeptide sequence which is at least 60%, 62%, 65%, 67%, 70%, 72%, 75%, 77%, 80%, 82%, 85%, 87%, 90%, 92%, 95%, 97%, 98%, 99% identical to SEQ ID NO: 111, a polypeptide sequence which is at least 60%, 62%, 65%, 67%, 70%, 72%, 75%, 77%, 80%, 82%, 85%, 87%, 90%, 92%, 95%, 97%, 98%, 99% identical to SEQ ID NO: 135, a polypeptide sequence which is at least 60%, 62%, 65%, 67%, 70%, 72%, 75%, 77%, 80%, 82%, 85%, 87%, 90%, 92%, 95%, 97%, 98%, 99% identical to SEQ ID NO: 187, or a polypeptide sequence which is at least 60%, 62%, 65%, 67%, 70%, 72%, 75%, 77%, 80%, 82%, 85%, 87%, 90%, 92%, 95%, 97%, 98%, 99% identical to SEQ ID NO: 211.

[0135] In some embodiments, the first light chain comprises a polypeptide sequence which is at least 60%, 62%, 65%, 67%, 70%, 72%, 75%, 77%, 80%, 82%, 85%, 87%, 90%, 92%, 95%, 97%, 98%, 99% identical to SEQ ID NO: 48, a polypeptide sequence which is at least 60%, 62%, 65%, 67%, 70%, 72%, 75%, 77%, 80%, 82%, 85%, 87%, 90%, 92%, 95%, 97%, 98%, 99% identical to SEQ ID NO: 112, a polypeptide sequence which is at least 60%, 62%, 65%, 67%, 70%, 72%, 75%, 77%, 80%, 82%, 85%, 87%, 90%, 92%, 95%, 97%, 98%, 99% identical to SEQ ID NO: 136, a polypeptide sequence which is at least 60%, 62%, 65%, 67%, 70%, 72%, 75%, 77%, 80%, 82%, 85%, 87%, 90%, 92%, 95%, 97%, 98%, 99% identical to SEQ ID NO: 188, or a polypeptide sequence which is at least 60%, 62%, 65%, 67%, 70%, 72%, 75%, 77%, 80%, 82%, 85%, 87%, 90%, 92%, 95%, 97%, 98%, 99% identical to SEQ ID NO: 212.

[0136] In some embodiments, the second heavy chain comprises a polypeptide sequence which is at least 60%, 62%, 65%, 67%, 70%, 72%, 75%, 77%, 80%, 82%, 85%, 87%, 90%, 92%, 95%, 97%, 98%, 99% identical to SEQ ID NO: 49, a polypeptide sequence which is at least 60%, 62%, 65%, 67%, 70%, 72%, 75%, 77%, 80%, 82%, 85%, 87%, 90%, 92%, 95%, 97%, 98%, 99% identical to SEQ ID NO: 113, a polypeptide sequence which is at least 60%, 62%, 65%, 67%, 70%, 72%, 75%, 77%, 80%, 82%, 85%, 87%, 90%, 92%, 95%, 97%, 98%, 99% identical to SEQ ID NO: 137, a polypeptide sequence which is at least 60%, 62%, 65%, 67%, 70%, 72%, 75%, 77%, 80%, 82%, 85%, 87%, 90%, 92%, 95%, 97%, 98%, 99% identical to SEQ ID NO: 189, or a polypeptide sequence which is at least 60%, 62%, 65%, 67%, 70%, 72%, 75%, 77%, 80%, 82%, 85%, 87%, 90%, 92%, 95%, 97%, 98%, 99% identical to SEQ ID NO: 213.

[0137] In some embodiments, the second light chain comprises a polypeptide sequence which is at least 60%, 62%, 65%, 67%, 70%, 72%, 75%, 77%, 80%, 82%, 85%, 87%, 90%, 92%, 95%, 97%, 98%, 99% identical to SEQ ID NO: 50, a polypeptide sequence which is at least 60%, 62%, 65%, 67%, 70%, 72%, 75%, 77%, 80%, 82%, 85%, 87%, 90%, 92%, 95%, 97%, 98%, 99% identical to SEQ ID NO: 114, a polypeptide sequence which is at least 60%, 62%, 65%, 67%, 70%, 72%, 75%, 77%, 80%, 82%, 85%, 87%, 90%, 92%, 95%, 97%, 98%, 99% identical to SEQ ID NO: 138, a polypeptide sequence which is at least 60%, 62%, 65%, 67%, 70%, 72%, 75%, 77%, 80%, 82%, 85%, 87%, 90%, 92%, 95%, 97%, 98%, 99% identical to SEQ ID NO: 190, or a polypeptide sequence which is at least 60%, 62%, 65%, 67%, 70%, 72%, 75%, 77%, 80%, 82%, 85%, 87%, 90%, 92%, 95%, 97%, 98%, 99% identical to SEQ ID NO: 214.

[0138] In some embodiments, the variable domain of the first heavy chain comprises a polypeptide sequence which is at least 60%, 62%, 65%, 67%, 70%, 72%, 75%, 77%, 80%, 82%, 85%, 87%, 90%, 92%, 95%, 97%, 98%, 99% identical to SEQ ID NO: 35, a polypeptide sequence which is at least 60%, 62%, 65%, 67%, 70%, 72%, 75%, 77%, 80%, 82%, 85%, 87%, 90%, 92%, 95%, 97%, 98%, 99% identical to SEQ ID NO: 13. In some embodiments, the variable domain of the first light chain comprises a polypeptide sequence which is at least 60%, 62%, 65%, 67%, 70%, 72%, 75%, 77%, 80%, 82%, 85%, 87%, 90%, 92%, 95%, 97%, 98%, 99% identical to SEQ ID NO: 36, a polypeptide sequence which is at least 60%, 62%, 65%, 67%, 70%, 72%, 75%, 77%, 80%, 82%, 85%, 87%, 90%, 92%, 95%, 97%, 98%, 99% identical to SEQ ID NO: 14. In some embodiments, the variable domain of the second heavy chain comprises a polypeptide sequence which is at least 60%, 62%, 65%, 67%, 70%, 72%, 75%, 77%, 80%, 82%, 85%, 87%, 90%, 92%, 95%, 97%, 98%, 99% identical to SEQ ID NO: 13, a polypeptide sequence which is at least 60%, 62%, 65%, 67%, 70%, 72%, 75%, 77%, 80%, 82%, 85%, 87%, 90%, 92%, 95%, 97%, 98%, 99% identical to SEQ ID NO: 45, a polypeptide sequence which is at least 60%, 62%, 65%, 67%, 70%, 72%, 75%, 77%, 80%, 82%, 85%, 87%, 90%, 92%, 95%, 97%, 98%, 99% identical to SEQ ID NO: 43.

[0139] In some embodiments, the variable domain of the second light chain comprises a polypeptide sequence which is at least 60%, 62%, 65%, 67%, 70%, 72%, 75%, 77%, 80%, 82%, 85%, 87%, 90%, 92%, 95%, 97%, 98%, 99% identical to SEQ ID NO: 14, a polypeptide sequence which is at least 60%, 62%, 65%, 67%, 70%, 72%, 75%, 77%, 80%, 82%, 85%, 87%, 90%, 92%, 95%, 97%, 98%, 99% identical to SEQ ID NO: 46, a polypeptide sequence which is at least 60%, 62%, 65%, 67%, 70%, 72%, 75%, 77%, 80%, 82%, 85%, 87%, 90%, 92%, 95%, 97%, 98%, 99% identical to SEQ ID NO: 44.

[0140] In some embodiments, the variable domain of the first heavy chain comprises CDR1, CDR2, and CDR3 of SEQ ID NO: 47; CDR1, CDR2, and CDR3 of SEQ ID NO: 111; CDR1, CDR2, and CDR3 of SEQ ID NO: 135; CDR1, CDR2, and CDR3 of SEQ ID NO: 187; or CDR1, CDR2, and CDR3 of SEQ ID NO: 211. In some embodiments, the variable domain of the first light chain comprises CDR1, CDR2, and CDR3 of SEQ ID NO: 48, CDR1, CDR2, and CDR3 of SEQ ID NO: 112; CDR1, CDR2, and CDR3 of SEQ ID NO: 136; CDR1, CDR2, and CDR3 of SEQ ID NO: 188; or CDR1, CDR2, and CDR3 of SEQ ID NO: 212. In some embodiments, the variable domain of the second heavy chain comprises CDR1, CDR2, and CDR3 of SEQ ID NO: 49, CDR1, CDR2, and CDR3 of SEQ ID NO: 113; CDR1, CDR2, and CDR3 of SEQ ID NO: 137; CDR1, CDR2, and CDR3 of SEQ ID NO: 189; or CDR1, CDR2, and CDR3 of SEQ ID NO: 213. In some embodiments, the variable domain of the second light chain comprises CDR1, CDR2, and CDR3 SEQ ID NO: 50, CDR1, CDR2, and CDR3 of SEQ ID NO: 114; CDR1, CDR2, and CDR3 of SEQ ID NO: 138; CDR1, CDR2, and CDR3 of SEQ ID NO: 190; or CDR1, CDR2, and CDR3 of SEQ ID NO: 214. In some embodiments, the molecule comprises SEQ ID NO: 47, SEQ ID NO: 48, SEQ ID NO: 49, and SEQ ID NO: 50. In some embodiments, the molecule comprises SEQ ID NO:111, SEQ ID NO: 112, SEQ ID NO: 113, and SEQ ID NO: 114. In some embodiments, the molecule comprises SEQ ID NO: 135, SEQ ID NO: 135, SEQ ID NO: 137, and SEQ ID NO: 138. In some embodiments, the molecule comprises SEQ ID NO: 187, SEQ ID NO: 188, SEQ ID NO: 189, and SEQ ID NO: 190. In some embodiments, the molecule comprises SEQ ID NO: 211, SEQ ID NO: 212, SEQ ID NO: 213, and SEQ ID NO: 214.

[0141] In some embodiments, the molecule further comprises one or more disulfide bonds. In some embodiments, the molecule further comprises one or more linker sequences. In some embodiments, the molecule is capable of neutralizing a coronavirus. In some embodiments, the coronavirus is a SARS-CoV-2 virus. In some embodiments, the SARS-CoV-2 virus strain is selected from the group consisting of WA1, B.1.1.7, B1.526, B1.351, P1, B1.352, and B.1.427.

[0142] In some embodiments, the molecule specifically recognizes a first epitope and a second epitope on a SARS-CoV-2 particle. In some embodiments, the first epitope comprises at least a portion of a receptor binding domain (RBD) on a spike protein of a SARS-CoV-2 particle. In some embodiments, the second epitope comprises at least a portion of a N-terminal domain (NTD) on a spike protein of a SARS-CoV-2 particle. In some embodiments, the composition is administered in combination with a second therapeutic agent.

### BRIEF DESCRIPTION OF FIGURES

[0143] The patent or application file contains at least one drawing originally in color. To conform to the requirements for PCT patent applications, many of the figures presented herein are black and white representations of images originally created in color.

[0144] FIGS. 1A-C show images of coronavirus. FIG. 1A shows a SARS-CoV-2 viral particle schematic diagram. FIG. 1B shows a spike protein trimer structure. FIG. 1C shows an electronic micrograph of coronavirus particles. The arrow denotes the viral spike protein on the viral membrane.

[0145] FIGS. 2A-G show individual antibody responses to SARS-CoV-2 virus. FIGS. 2A-F shows ELISA binding assays in which various COVID-19 patient plasma samples (indicated by different colored lines) were tested for their ability to bind to SARS-CoV-2 nucleocapsid antigen (FIGS. 2A and D), SARS-CoV-2 envelope trimer antigen (FIGS. 2B and E), and SARS-CoV envelope trimer antigen (FIGS. 2C and F). FIGS. 2A-C show responses for patients with severe disease. FIGS. 2D-F show responses for patients with non-severe disease. FIG. 2G shows that a higher SARS-CoV-2 antibody responses are present in plasma samples of patients with severe COVID-19 as compared to patients with non-severe COVID-19.

[0146] FIGS. 3A-J show antibody responses that neutralize SARS-CoV-2 potently.

[0147] FIGS. 3A-F show individual neutralization assays for patients with severe disease (FIGS. 3A-C) and patients with non-severe disease (FIGS. 3D-F). FIGS. 3A and D show neutralization of SARS-CoV-2 pseudovirus. FIGS. 3B and E show neutralization of SARS-CoV pseudovirus. FIGS. 3C and F show neutralization of SARS-CoV-2 live virus. FIG. 3G shows a plot of the infective dose (ID₅₀), or the estimated number of virus particles required to produce a 50% infection, obtained from FIGS. 3A-F. FIGS. 3H-J show correlation of the IC₅₀ values obtained by pseudovirus neutralization assays with live virus neutralization IC50 (FIG. 311), half-maximal plasma dilution (FIG. 3I), and 1:400 OD₄₅₀ (FIG. 3J).

[0148] FIGS. 4A-C show schematics for identifying potent neutralizing antibodies against COVID-19. FIG. 4A shows a schematic of producing potent neutralizing antibodies.

[0149] FIG. 4B shows memory B cells sorted from a healthy individual and a COVID-19 patient.

[0150] FIG. 4C shows a table of seven patient donors and the number of antibodies isolated from each donor.

[0151] FIGS. 5A-D show binding and neutralization assays of mAbs against the SARS-CoV-2 virus. FIG. 5A shows a binding assay of synthesized antibodies with the SARS-CoV-2 spike protein trimer. FIG. 5B shows a binding assay of synthesized antibodies with the SARS-CoV-2 receptor binding domain. FIG. 5C shows neutralization assay of synthesized antibodies with SARS-CoV-2 pseudovirus. FIG. 5D shows neutralization assay of synthesized antibodies with SARS-CoV-2 live virus.

[0152] FIGS. 6A-F show epitope mapping of SARS-CoV-2 specific monoclonal antibodies by competition ELISA assay. FIGS. 6A-C show individual synthesized mAbs binding affinity to the receptor-binding domain (RBD), with antibody numbers 2-4, 2-15, and 2-38 specifically binding to the RBD. FIGS. 6D-F show individual synthesized mAbs binding affinity to the receptor-binding domain (RBD), with antibody numbers 2-51, 4-8, and 4-32 showing no binding affinity to the RBD.

[0153] FIGS. 7A-E show surface plasmon resonance (SPR) assay for mAb binding to the spike protein trimers. Each panel represents the binding affinity and binding kinetics of the indicated monoclonal antibody (i.e., 2-4, 2-15, 2-38, etc.) to the SARS-CoV-2 envelope timer. Colored lines indicated different dilutions of the respective antibody tested. FIG. 7A shows mAb 2-4. FIG. 7B shows mAb 2-15. FIG. 7C shows mAb 2-38. FIG. 7D shows mAb 2-51. FIG. 7E shows mAb 4-8.

[0154] FIGS. 8A-D show initial screenings of mAbs that bind and neutralize the SARS-CoV-2 virus. FIG. 8A shows mAbs binding to spike trimer protein. FIG. 8B shows mAbs binding to the receptor-binding domain (RBD). FIG. 8C shows IC₅₀ values for pseudotyped virus infection. FIG. 8D shows percent inhibition values for live virus infection.

[0155] FIG. 9 shows a summary of the SARS-CoV-2-specific mAb screening. Number of most potent neutralizing mAbs: 17.

[0156] FIGS. 10A-I show binding of potent neutralizing mAbs to spike protein trimer, RBD and N-terminal domain (NTD). FIGS. 10A, D, and G show binding to spike protein trimer. FIGS. 10B, E, and H show binding to the RBD. FIGS. 10C, F, and I show binding to the NTD. FIGS. 10A-C show binding of mAbs, which potently bind the RBD. FIGS. 10D-F show binding of mAbs, which potently bind the NTD. FIGS. 10G-I show binding of mAb, which bind epitopes other than the RBD or the NTD.

[0157] FIGS. 11A-F show SARS-CoV-2 neutralization activity of select mAbs. FIG. 11A shows neutralization activity of RBD-targeting mAbs neutralizing a pseudovirus infection. FIG. 11B shows neutralization activity of NTD-targeting mAbs neutralizing a pseudovirus infection. FIG. 11C shows neutralization activity of mAbs, which target epitopes other than the RBD or the NTD, neutralizing a pseudovirus infection. FIG. 11D shows neutralization activity of RBD-targeting mAbs neutralizing a live virus infection. FIG. 11E shows neutralization activity of NTD-targeting mAbs neutralizing a live virus infection. FIG. 11F shows neutralization activity of mAbs, which target epitopes other than the RBD or the NTD, neutralizing a live virus infection.

[0158] FIGS. 12A-B show a CryoEM structure of an RBD-targeting monoclonal antibody. FIG. 12A shows a side view of the mAb. FIG. 12B shows a top view of the mAb.

[0159] FIGS. 13A-B show a CryoEM structure of an NTD-targeting monoclonal antibody. FIG. 13A shows a side view of the mAb. FIG. 13B shows a top view of the mAb.

[0160] FIG. 14 shows three SARS-CoV-2 neutralizing epitope clusters identified on the spike protein trimer.

[0161] FIGS. 15A-E show isolation of SARS-CoV-2 mAbs from infected patients with severe disease. FIG. 15A shows plasma neutralization profile of 40 patients against SARS-CoV-2 pseudovirus (highlighted are 5 top neutralizers chosen). All 252 transfection supernatants were screened for binding to S trimer and RBD, as well as for neutralization against SARS-CoV-2 pseudovirus and live virus. For pseudovirus neutralization, the 50% inhibitory dilutions (IC50) of each supernatant were plotted. For live virus, semi-quantitative representation of the inhibition at a dilution of 1:50, with neutralization levels ranging from (−) for none to (+++) for complete neutralization, was plotted. Potent antibodies later identified are marked by vertical lines and labelled at the bottom. The antibodies from each patient are formatted or colored as in FIG. 15A. FIG. 15B shows s trimer binding. FIG. 15C shows RBD binding. FIG. 15D shows pseudovirus neutralization. FIG. 15E shows live virus neutralization.

[0162] FIGS. 16A-0 show characterization of SARS-CoV-2 potent neutralizing mAbs. FIGS. 16A, D, and G show binding profiles of 19 purified potent neutralizing mAbs against SARS-CoV-2 S trimer (left). FIGS. 16B, E, and H show binding profiles of 19 purified potent neutralizing mAbs against SARS-CoV-2 RBD (middle). FIGS. 16C, F, and I show binding profiles of 19 purified potent neutralizing mAbs against SARS-CoV-2 NTD (right). Note that mAb 2-30 bound multiple proteins at high concentrations. FIG. 16J shows pseudovirus neutralization against SARS-CoV-2 RBD. FIG. 16K shows pseudovirus neutralization against SARS-CoV-2 NTD. FIG. 16L shows pseudovirus neutralization against other epitopes on the SARS-CoV-2 virion. FIG. 16M shows live virus neutralization against SARS-CoV-2 RBD. FIG. 16N shows live virus neutralization against SARS-CoV-2 NTD. FIG. 16O shows live virus neutralization against other epitopes on the SARS-CoV-2 virion. The neutralization profiles are for the 19 purified mAbs. Single replicate of the binding experiment and triplicates of neutralization are presented as mean±SEM.

[0163] FIGS. 17A-D show epitope mapping of select neutralizing and non-neutralizing mAbs. Competition results of non-RBD binders (FIG. 17A) and RBD binders (FIG. 17B) in blocking ACE2 or biotinylated mAb binding to the S trimer. In addition, the ability to bind NTD and RBD of each mAb is shown. The numbers in each box show the area under each competition curve (AUC) as tested by ELISA. +/− indicates binding/no binding of the mAb to the protein. FIG. 17C shows a Venn diagram interpretation of results from FIG. 17B. FIG. 17D shows a Venn diagram interpretation of results from FIG. 17B.

[0164] FIGS. 18A-D show Cryo-EM reconstructions of Fab-spike complexes and visualization of neutralizing epitopes on the spike surface. FIG. 18A shows a Cryo-EM 3D reconstruction of antibody 2-4 in complex with S trimer at 3.2 Å overall resolution. Density is colored according to spike domain with RBD in green, NTD in orange, with other regions colored grey. FIG. 18B shows a Cryo-EM reconstruction of antibody 4-8 in complex with S trimer (ribbon diagram, colored as in a) at 3.9 Å overall resolution, with RBDs in the “all-down” configuration. The resolution of antibody density is limited by molecular motion. Although the binding of Fab to NTD and antibody position are clear, the identities of heavy and light chain are uncertain. FIG. 18C shows a Cryo-EM reconstruction of the antibody 2-43 in complex with S trimer at 7.8 Å resolution reveals a quaternary epitope involving RBD from one subunit and NTD from the next. FIG. 18D shows mapping of the Venn diagrams from FIG. 17B onto the surface of the viral spike.

[0165] FIG. 19 shows Patient information. Abbreviation: ARDS, acute respiratory distress syndrome; MV, mechanical ventilation; hsCRP, high sensitivity C-reactive protein, ULN>10 mg/L; ESR, erythrocyte sedimentation rate, ULN=20 mm/hr; Interleukin 6, ULN=5 pg/mL; Ferritin, ULN=150 ng/mL; D-dimer quantitative ULN=0.8 μg/mL FEU.

[0166] FIG. 20 shows summary of mAb screening.

[0167] FIG. 21 shows Cryo-EM data collection, refinement, and validation statistics.

[0168] FIGS. 22A-C show SARS-CoV-2 S trimer-specific antibody isolation strategy. FIG. 22A shows a schema for isolating of S trimer-specific mAbs from memory B cells in the blood of infected patients. FIG. 22B shows sorting results on the isolation of S trimer-specific memory B cells using flow cytometry. FIG. 22C shows magnified representation of the panel of S trimer-positive memory B cells for each patient. Inset numbers indicate the absolute number and the percentage of S trimer-specific memory B cells isolated from each case.

[0169] FIGS. 23A-G show Genetic features of SARS-CoV-2-specific antibody repertoire. FIG. 23A shows that most of the 121 trimer S-specific antibodies are of IgG isotype. FIG. 23B shows the heavy chains The kappa (FIG. 23C) and lambda (FIG. 23D) light chains are comparably used. Compared to IgG repertoires of healthy human donors, IGHV3-30 and IGKV3-20 genes are over-represented in heavy and light chain repertoires, respectively (132-test, p<0.05). FIG. 23E shows that the usage of IGHJ6 gene was significantly higher in antigen-specific antibodies (132-test, p<0.05). FIG. 23F shows that the CDRH3 length of antigen-specific antibodies is significantly longer than in healthy donors (Kolmogorov—Smirnov test, p=0.014). FIG. 23G shows that for both heavy and light chains, the V region nucleotide somatic hypermutation levels are significantly lower than in antibodies of healthy donors (Kolmogorov—Smirnov test, p<0.001).

[0170] FIG. 24 shows The best-fit pseudovirus neutralization curves for 130 samples that were positive in at least one of the screens shown in FIGS. 15B-E. The 18 transfection supernatants that showed evidently better potency are highlighted in colors, while others with non-neutralizing or weakly neutralizing activities are shown in grey. One additional supernatant (Patient 1) that was initially missed in the pseudovirus screen but later found to be a potent neutralizing mAb (1-87) is also highlighted.

[0171] FIG. 25 shows The pseudovirus neutralization profiles for 12 purified mAbs that strongly bound the S trimer but with weak or no virus-neutralizing activities. The four mAbs with weak neutralizing activities against SARS-CoV-2 pseudovirus are shown in sold lines, and the remaining 8 non-neutralizing mAbs are shown in dashed lines.

[0172] FIGS. 26A-C shows monoclonal Ab 2-43 bound to S trimer expressed on Expi293 cell surface can be competed out by mAbs directed to RBD but only minimally by mAbs to the NTD region. FIG. 26A shows results for 2-43 and proteins. FIG. 26B shows results for NTD-directed mAbs. FIG. 26C shows results for RBD-directed mAbs.

[0173] FIGS. 27A-F show Cryo-EM data processing for antibody 2-4 in complex with the S trimer. FIG. 27A shows a representative micrograph and CTF of the micrograph. FIG. 27B shows a representative 2D class averages. FIG. 27C shows a resolution of the consensus map with C3 symmetry as calculated by 3DFSC. FIG. 27D shows the local resolution of the full map as calculated by cryoSPARC at an FSC cutoff of 0.5. Representative density of the Fab 2-4 and RBD interface, showing CRR H3, L3, and L3 (FIG. 27E), along with CDR H2 and the N-linked glycosylation at ASN58 (FIG. 27F).

[0174] FIGS. 28A-E show Fab 2-4 binding. FIG. 28A shows Fab 2-4 binding interface with RBD. FIG. 28B shows positions of antibodies 2-4, S309⁸, and BD-23⁹ on the trimeric CoV-2 spike. FIG. 28C shows somatic hypermutations found only in the antibody 2-4 heavy chain, shown in brown. The mutation A60T creates an N×T sequence leading to N58 glycosylation. FIG. 28D shows antibody 2-4 in complex with S trimer. CDR loops are indicated in colors, 751 and side chains are shown for interacting residues. FIG. 28E shows antibody BD-23⁹ in complex with S trimer.

[0175] FIGS. 29A-F show Cryo-EM data processing for antibody 4-8 in complex with the S trimer. FIG. 29A shows a representative micrograph and CTF of the micrograph. FIG. 29B shows a representative 2D class averages. FIG. 29C shows resolution of the spike in the RBD down conformation in complex with Fab 4-8. FIG. 29D shows resolution of the spike in the RBD up conformation in complex with Fab 4-8. FIG. 29E shows local resolution of the spike in the RBD down conformation in complex with Fab 4-8 at an FSC cutoff of 0.5. Two thresholds are shown. FIG. 29F shows local resolution of the spike in the RBD up conformation in complex with Fab 4-8 at an FSC cutoff of 0.5. Two thresholds are shown.

[0176] FIG. 30 shows 3D reconstructions of NTD-targeting neutralizing antibody 4-8 in complex with the SARS-CoV-2 spike trimer with the 1-RBD-up conformation.

[0177] FIGS. 31A-D show Cryo-EM data processing for antibody 2-43 in complex with the S trimer. FIG. 31A shows a representative micrograph and CTF of the micrograph. FIG. 31B shows representative 2D class averages. FIG. 31C shows resolution of Fab 2-43 in complex with S trimer. FIG. 31D shows the local resolution of the full map as calculated by cryoSPARC at an FSC cutoff of 0.5.

[0178] FIGS. 32A-B show monoclonal antibody 2-15 mut. FIG. 32A shows virus neutralization with the 2-15 mut antibody. FIG. 32B shows potency of the 2-15 mut antibody.

[0179] FIGS. 33A-B show select mutants of the 4-8 monoclonal antibody. FIG. 33A shows neutralization with antibodies 4-8 (39/51) and 4-8(39/51/57). FIG. 33B shows potency of antibodies 4-8 (39/51) and 4-8(39/51/57).

[0180] FIG. 34 shows IC₅₀ and IC₉₀ values of selected monoclonal antibody mutants.

[0181] FIG. 35 shows that antibody 2-36 is a potent neutralizer against SARS-CoV pseudovirus.

[0182] FIGS. 36A-B show ELISA binding of antibody 2-36 to SARS-CoV-2 Spike trimer (FIG. 36A) and SARS-CoV Spike trimer (FIG. 36B). Antibody CR3022, an antibody previously reported to have cross-activity, served as a control.

[0183] FIGS. 37A-D show the binding affinities of antibody 2-36 and antibody 2-4 to SARS-CoV-2 Spike trimer and to SARS-CoV Spike trimer, as measured by SPR. Antibody 2-36 was confirmed to binds to both SARS-CoV-2 (FIG. 37A) and SARS-CoV (FIG. 37B) spikes, but with a higher affinity to SARS-CoV-2 spike. As a control, the SARS-CoV-2 specific antibody 2-4 only binds only to SARS-CoV-2 spike (FIG. 37C), but not to SARS-CoV spike (FIG. 37D).

[0184] FIGS. 38A-B show neutralization assay results. Antibody 2-36 neutralized both SARS-CoV-2 (FIG. 38A) and SARS-CoV (FIG. 38B), as compared to the control antibody CR3022 that neutralized SARS-CoV (FIG. 38B) but only very weakly neutralized SARS-CoV-2 (FIG. 38A); and as compared to the SARS-CoV-2 specific antibody 2-4 that only neutralize SARS-CoV-2 (FIG. 38A).

[0185] FIGS. 39A-B show that antibody 2-36 neutralizes SARS-like coronaviruses using hACE2. FIG. 39A shows the lineage of coronavirus, including several from bats and pangolins. FIG. 39B shows that antibody 2-36 could neutralize SARS-CoV and SARS-CoV-2 and their related lineage viruses, but that antibody 2-36 could not neutralize MERS-CoV and 229E, indicating its breadth.

[0186] FIGS. 40A-D show the cryo-EM structure of antibody 2-36 complexed with SARS-CoV-2. FIG. 40A shows the cryo-EM structure of 2-36 in complex with SARS-CoV-2 Spike trimer and FIG. 40B further details how 2-36 interacts with spike at the CDR level.

[0187] FIG. 40C shows that antibody 2-36 binds to the side of the RBD and can compete with ACE2 for RBD binding, although its epitope does not overlap the ACE2-binding site. FIG. 40D depicts that the spike protein is highly conserved.

[0188] FIG. 41 shows a schematic representation of an engineered bispecific antibody combining the binding specificity of two neutralizing antibodies into one.

[0189] FIG. 42 shows that the 2-17/1-57 bispecific antibody against SARS-CoV-2 does not enhance potency compared to respective single arm counterpart. Ab X and Ab Y are single arm irrelevant controls. X=PGDM1400 (HIV neutralization Ab). Y=A32 (HIV neutralization Ab).

[0190] FIG. 43 shows potent neutralization of bispecific antibody 2-17/2-7 against SARS-CoV-2 compared to respective single arm counterpart. Ab X and Ab Y are single arm irrelevant controls. X=PGDM1400 (HIV neutralization Ab). Y=A32 (HIV neutralization Ab).

[0191] FIG. 44 shows potent neutralization of bispecific antibody 2-17/2-15 against SARS-CoV-2 compared to respective single arm counterpart. Ab X and Ab Y are single arm irrelevant controls. X=PGDM1400 (HIV neutralization Ab). Y=A32 (HIV neutralization Ab).

[0192] FIG. 45 shows potent neutralization of bispecific antibody 2-17/2-30 against SARS-CoV-2 compared to respective single arm counterpart. Ab X and Ab Y are single arm irrelevant controls. X=PGDM1400 (HIV neutralization Ab). Y=A32 (HIV neutralization Ab).

[0193] FIG. 46 shows potent neutralization of bispecific antibody 2-17/4-20 against SARS-CoV-2 compared to respective single arm counterpart. Ab X and Ab Y are single arm irrelevant controls. X=PGDM1400 (HIV neutralization Ab). Y=A32 (HIV neutralization Ab).

[0194] FIG. 47 shows potent neutralization of bispecific antibody 5-24/1-57 against SARS-CoV-2 compared to respective single arm counterpart. Ab X and Ab Y are single arm irrelevant controls. X=PGDM1400 (HIV neutralization Ab). Y=A32 (HIV neutralization Ab).

[0195] FIG. 48 shows potent neutralization of bispecific antibody 5-24/2-15 against SARS-CoV-2 compared to respective single arm counterpart. Ab X and Ab Y are single arm irrelevant controls. X=PGDM1400 (HIV neutralization Ab). Y=A32 (HIV neutralization Ab).

[0196] FIG. 49 shows bispecific antibody 5-24/4-20 against SARS-CoV-2 does not enhance potency (IC₅₀) compared to respective single arm counterpart. Ab X and Ab Y are single arm irrelevant controls. X=PGDM1400 (HIV neutralization Ab). Y=A32 (HIV neutralization Ab).

[0197] FIG. 50 shows potent neutralization of bispecific antibody 1-20/1-68 against SARS-CoV-2 compared to respective single arm counterpart. Ab X and Ab Y are single arm irrelevant controls. X=PGDM1400 (HIV neutralization Ab). Y=A32 (HIV neutralization Ab).

[0198] FIG. 51 shows potent neutralization of bispecific antibody 1-20/2-17 against SARS-CoV-2 compared to respective single arm counterpart. Ab X and Ab Y are single arm irrelevant controls. X=PGDM1400 (HIV neutralization Ab). Y=A32 (HIV neutralization Ab).

[0199] FIG. 52 shows potent neutralization of bispecific antibody 1-20/4-18 against SARS-CoV-2 compared to respective single arm counterpart. Ab X and Ab Y are single arm irrelevant controls. X=PGDM1400 (HIV neutralization Ab). Y=A32 (HIV neutralization Ab).

[0200] FIG. 53 shows potent neutralization of bispecific antibody 1-20/5-24 against SARS-CoV-2 compared to respective single arm counterpart. Ab X and Ab Y are single arm irrelevant controls. X=PGDM1400 (HIV neutralization Ab). Y=A32 (HIV neutralization Ab).

[0201] FIG. 54 shows potent neutralization against SARS-CoV-2. Bispecific antibodies with 2-17 as a component are more potent than the single arm control (2-17/A32, A32 is a control antibody which shows no activity against SARS-CoV-2), indicating both arms are contributing to the neutralization activity of the bispecific molecule.

[0202] FIG. 55 shows potent neutralization against SARS-CoV-2 with bispecific antibodies containing 5-24 as a component. In antibody 5-24/A32, A32 is a control antibody which shows no activity against SARS-CoV-2, indicating both arms are contributing to the neutralization activity of the bispecific molecule.

[0203] FIG. 56 shows potent neutralization against SARS-CoV-2 with bispecific antibodies containing 1-20 as a component. In antibody 1-20/A32, A32 is a control antibody which shows no activity against SARS-CoV-2), indicating both arms are contributing to the neutralization activity of the bispecific molecule.

[0204] FIGS. 57A-E show bispecific antibodies with 1-20 (RBD) as a parental antibody. FIG. 57A shows virus neutralization with bispecific antibodies 1-20/5-24, 1-20/4-18, 1-20/2-17, and 1-20/1-68. FIG. 57B shows virus neutralization with the bispecific antibody 1-20/5-24 compared to control antibodies. FIG. 57C shows virus neutralization with the bispecific antibody 1-20/4-18 compared to control antibodies. FIG. 57D shows virus neutralization with the bispecific antibody 1-20/2-17 compared to control antibodies. FIG. 57E shows virus neutralization with the bispecific antibody 1-20/1-68 compared to control antibodies.

[0205] FIG. 58 shows potencies of bispecific antibodies with 1-20 (RBD) as a parental antibody.

[0206] FIGS. 59A-G show bispecific antibodies with 2-17 (NTD) as a parental antibody. FIG. 59A shows virus neutralization with bispecific antibodies 2-17/2-7, 2-17/1-57, 2-36/2-17, 2-17/4-20, 2-17/2-30, and 2-17/2-15. FIG. 59B shows virus neutralization with the bispecific antibody 2-17/2-7 compared to control antibodies. FIG. 59C shows virus neutralization with the bispecific antibody 2-17/1-57 compared to control antibodies. FIG. 59D shows virus neutralization with the bispecific antibody 2-17/2-15 compared to control antibodies. FIG. 59E shows virus neutralization with the bispecific antibody 2-17/4-20 compared to control antibodies. FIG. 59F shows virus neutralization with the bispecific antibody 2-17/2-30 compared to control antibodies. FIG. 59G shows virus neutralization with the bispecific antibody 2-36/2-17 compared to control antibodies.

[0207] FIG. 60 shows potencies of bispecific antibodies with 2-17 (NTD) as a parental antibody.

[0208] FIGS. 61A-D show bispecific antibodies with 5-24 (NTD) as a parental antibody. FIG. 61A shows virus neutralization with bispecific antibodies 5-24/4-20, 5-24/1-57, 5-24/2-15, and 1-20/5-24. FIG. 61B shows virus neutralization with the bispecific antibody 5-24/2-15 compared to control antibodies. FIG. 61C shows virus neutralization with the bispecific antibody 5-24/1-57 compared to control antibodies. FIG. 61D shows virus neutralization with the bispecific antibody 5-24/4-20 compared to control antibodies.

[0209] FIG. 62 shows potencies of bispecific antibodies with 5-24 (NTD) as a parental antibody.

[0210] FIGS. 63A-D show bispecific antibodies with 2-36 (RBD) as a parental antibody. FIG. 63A shows virus neutralization with bispecific antibodies 2-36/1-68, 2-36/4-18, and 2-36/2-17. FIG. 63B shows virus neutralization with the bispecific antibody 2-36/2-17 compared to control antibodies. FIG. 63C shows virus neutralization with the bispecific antibody 2-36/1-68 compared to control antibodies. FIG. 63D shows virus neutralization with the bispecific antibody 2-36/4-18 compared to control antibodies.

[0211] FIG. 64 shows potencies of bispecific antibodies with 2-36 (RBD) as a parental antibody.

[0212] FIGS. 65A-C show bispecific antibodies with 2-30 (RBD) as a parental antibody. FIG. 65A shows virus neutralization with bispecific antibodies 2-30/4-18 and 2-30/1-68.

[0213] FIG. 65B shows virus neutralization with the bispecific antibody 2-30/1-68 compared to control antibodies. FIG. 65C shows virus neutralization with the bispecific antibody 2-30/4-18 compared to control antibodies.

[0214] FIG. 66 show potencies of bispecific antibodies with 2-30 (RBD) as a parental antibody.

[0215] FIGS. 67A-D show comparative evaluations of bispecific antibody 2-17/2-7. FIG. 67A shows the potency of the 2-17/2-7 bispecific antibody to antibodies where one arm resembles the individual parental component of the bispecific antibody while the other arm is an irrelevant control. It also compares the potency of the bispecific antibody to the combination of the two single arm IgG controls. FIG. 67B shows virus neutralization with a combination of the parental antibodies and each of the parental antibodies. FIG. 67C shows virus neutralization with the bispecific antibody 2-17/2-7 compared to a combination of the parental antibodies. FIG. 67D shows potency of combination parental monoclonal antibodies tested each at half of the amount of the corresponding bispecific antibody. As each monoclonal antibody has two identical arms and each bispecific antibody has only one arm for each monoclonal antibody, testing at half of the amount allows for the same concentration of each monoclonal antibody arm to be compared to the bispecific antibody and the monoclonal antibody combination.

[0216] FIGS. 68A-D show comparative evaluations of bispecific antibody 1-20/4-18. FIG. 68A compares the potency of the 1-20/4-18 bispecific antibody to an antibody where one arm resembles the individual parental component of the bispecific antibody while the other arm is an irrelevant control. It also compares the potency of the bispecific antibody to the combination of the two single arm IgG controls. FIG. 68B shows virus neutralization with a combination of the parental antibodies and each of the parental antibodies. FIG. 68C shows virus neutralization with the bispecific antibody 1-20/4-18 compared to a combination of the parental antibodies. FIG. 68D shows potency of combination parental monoclonal antibodies tested each at half of the amount of the corresponding bispecific antibody.

[0217] FIGS. 69A-D show comparative evaluations of bispecific antibody 1-20/5-24. FIG. 69A compares the potency of the 1-20/5-24 bispecific antibody to an antibody where one arm resembles the individual parental component of the bispecific antibody while the other arm is an irrelevant control. It also compares the potency of the bispecific antibody to the combination of the two single arm IgG controls. FIG. 69B shows virus neutralization with a combination of the parental antibodies and each of the parental antibodies. FIG. 69C shows virus neutralization with the bispecific antibody 1-20/5-24 compared to a combination of the parental antibodies. FIG. 69D shows potency of combination parental monoclonal antibodies tested each at half of the amount of the corresponding bispecific antibody.

[0218] FIGS. 70A-D show comparative evaluations of bispecific antibody 2-17/4-20. FIG. 70A compares the potency of the 2-17/4-20 bispecific antibody to an antibody where one arm resembles the individual parental component of the bispecific antibody while the other arm is an irrelevant control. It also compares the potency of the bispecific antibody to the combination of the two single arm IgG controls. FIG. 70B shows virus neutralization with a combination of the parental antibodies and each of the parental antibodies. FIG. 70C shows virus neutralization with the bispecific antibody 2-17/4-20 compared to a combination of the parental antibodies. FIG. 70D shows potency of combination parental monoclonal antibodies tested each at half of the amount of the corresponding bispecific antibody.

[0219] FIGS. 71A-B show in vitro potency of bispecific antibodies against SARS-CoV-2 authentic virus, strain USA/WA1. FIG. 71A shows neutralization for ten bispecific antibodies with IC₉₀ concentrations between 0.004 μg/ml and 0.025 μg/ml. FIG. 71B shows neutralization for nine bispecific antibodies with IC₉₀ concentrations between 0.026 μg/ml and 0.046 μg/ml. Authentic virus is another usage term for “infectious” virus. The term can also refer to “live virus”. The USA/WA1 strain is the first strain isolated in the United States and is provided by BEI resources.

[0220] FIG. 72 shows in vitro potency of bispecific antibodies presented from smallest to highest IC₉₀ concentration. Highlighted antibodies were tested with controls.

[0221] FIGS. 73A-B show in vitro potency of bispecific antibodies showing IC₉₀ and IC₅₀ concentrations. FIG. 73A shows in vitro potency of bispecific antibodies showing IC₉₀ and IC₅₀ concentrations relative to a 0.05 μg/ml threshold. FIG. 73B shows in vitro potency of bispecific antibodies showing IC₉₀ and IC₅₀ concentrations relative to a 0.01 μg/ml threshold.

[0222] FIGS. 74A-D show comparative evaluation of the bispecific antibody 1-57/1-68. FIG. 74A shows virus neutralization with the bispecific antibody 1-57/1-68 compared to two control bispecific antibodies, each comprising a parental antibody arm and a control antibody arm, and compared to a mix of the two control bispecific antibodies. AbX is an irrelevant control antibody arm, wherein AbX is PGDM1400. FIG. 74B shows virus neutralization with a combination of the parental antibodies and each of the parental antibodies. FIG. 74C shows virus neutralization with the bispecific antibody 1-57/1-68 compared to a combination of the parental antibodies. FIG. 74D shows potency of the bispecific antibody 1-57/1-68 and a mix of each parental monoclonal antibodies tested each at half of the amount of the corresponding bispecific antibody. The comparative data are from a single experiment, while, the data in the summary table are averaged from multiple repeats.

[0223] FIGS. 75A-D show comparative evaluation of the bispecific antibody 2-17/2-7. FIG. 75A shows virus neutralization with the bispecific antibody 2-17/2-7 compared to two control bispecific antibodies, each comprising a parental antibody arm and a control antibody arm, and compared to a mix of the two control bispecific antibodies. AbX and AbY are irrelevant control antibody arms, wherein AbX is PGDM1400 and AbY is A32. FIG. 75B shows virus neutralization with a combination of the parental antibodies and each of the parental antibodies. FIG. 75C shows virus neutralization with the bispecific antibody 2-17/2-7 compared to a combination of the parental antibodies. FIG. 75D shows potency of the bispecific antibody 2-17/2-7 and a mix of each parental monoclonal antibodies tested each at half of the amount of the corresponding bispecific antibody. The comparative data are from a single experiment, while, the data in the summary table are averaged from multiple repeats.

[0224] FIGS. 76A-D show comparative evaluation of the bispecific antibody 1-20/4-18. FIG. 76A shows virus neutralization with the bispecific antibody 1-20/4-18 compared to two control bispecific antibodies, each comprising a parental antibody arm and a control antibody arm, and compared to a mix of the two control bispecific antibodies. AbX and AbY are irrelevant control antibody arms, wherein AbX is PGDM1400 and AbY is A32. FIG. 76B shows virus neutralization with a combination of the parental antibodies and each of the parental antibodies. FIG. 76C shows virus neutralization with the bispecific antibody 1-20/4-18 compared to a combination of the parental antibodies. FIG. 76D shows potency of the bispecific antibody 1-20/4-18 and a mix of each parental monoclonal antibodies tested each at half of the amount of the corresponding bispecific antibody. The comparative data are from a single experiment, while, the data in the summary table are averaged from multiple repeats.

[0225] FIGS. 77A-D show comparative evaluation of the bispecific antibody 1-20/5-24. FIG. 77A shows virus neutralization with the bispecific antibody 1-20/5-24 compared to two control bispecific antibodies, each comprising a parental antibody arm and a control antibody arm, and compared to a mix of the two control bispecific antibodies. AbX and AbY are irrelevant control antibody arms, wherein AbX is PGDM1400 and AbY is A32. FIG. 77B shows virus neutralization with a combination of the parental antibodies and each of the parental antibodies. FIG. 77C shows virus neutralization with the bispecific antibody 1-20/5-24 compared to a combination of the parental antibodies. FIG. 77D shows potency of the bispecific antibody 1-20/5-24 and a mix of each parental monoclonal antibodies tested each at half of the amount of the corresponding bispecific antibody. The comparative data are from a single experiment, while, the data in the summary table are averaged from multiple repeats.

[0226] FIGS. 78A-D show comparative evaluation of the bispecific antibody 2-30/1-68. FIG. 78A shows virus neutralization with the bispecific antibody 2-30/1-68 compared to two control bispecific antibodies, each comprising a parental antibody arm and a control antibody arm, and compared to a mix of the two control bispecific antibodies. AbX is an irrelevant control antibody arms, wherein AbX is PGDM1400. FIG. 78B shows virus neutralization with a combination of the parental antibodies and each of the parental antibodies. FIG. 78C shows virus neutralization with the bispecific antibody 2-30/1-68 compared to a combination of the parental antibodies. FIG. 78D shows potency of the bispecific antibody 2-30/1-68 and a mix of each parental monoclonal antibodies tested each at half of the amount of the corresponding bispecific antibody. The comparative data are from a single experiment, while, the data in the summary table are averaged from multiple repeats.

[0227] FIGS. 79A-D show comparative evaluation of the bispecific antibody 2-7/4-8 (39/51). FIG. 79A shows virus neutralization with the bispecific antibody 2-7/4-8 (39/51) compared to two control bispecific antibodies, each comprising a parental antibody arm and a control antibody arm, and compared to a mix of the two control bispecific antibodies. AbX is an irrelevant control antibody arms, wherein AbX is PGDM1400. FIG. 79B shows virus neutralization with a combination of the parental antibodies and each of the parental antibodies. FIG. 79C shows virus neutralization with the bispecific antibody 2-7/4-8 (39/51) compared to a combination of the parental antibodies. FIG. 79D shows potency of the bispecific antibody 2-7/4-8 (39/51) and a mix of each parental monoclonal antibodies tested each at half of the amount of the corresponding bispecific antibody. The comparative data are from a single experiment, while, the data in the summary table are averaged from multiple repeats.

[0228] FIGS. 80A-D show comparative evaluation of the bispecific antibody 1-57/1-87. FIG. 80A shows virus neutralization with the bispecific antibody 1-57/1-87 compared to two control bispecific antibodies, each comprising a parental antibody arm and a control antibody arm, and compared to a mix of the two control bispecific antibodies. AbX is an irrelevant control antibody arms, wherein AbX is PGDM1400. FIG. 80B shows virus neutralization with a combination of the parental antibodies and each of the parental antibodies. FIG. 80C shows virus neutralization with the bispecific antibody 1-57/1-87 compared to a combination of the parental antibodies. FIG. 80D shows potency of the bispecific antibody 1-57/1-87 and a mix of each parental monoclonal antibodies tested each at half of the amount of the corresponding bispecific antibody. The comparative data are from a single experiment, while, the data in the summary table are averaged from multiple repeats.

[0229] FIG. 81 shows potency of additional bispecific antibodies.

[0230] FIGS. 82A-B show neutralizing activities of engineered bispecific antibodies. FIG. 82A shows neutralizing activities against wild-type virus (WA1) at various antibody concentrations for bispecific antibodies 2-17/2-7, 1-57/5-7, 5-7/1-57, 2-7/5-7, 5-7/2-7. FIG. 82B shows antibody potency (IC50 and IC90) against wild-type virus (WA1) for bispecific antibodies 2-17/2-7, 1-57/5-7, 5-7/1-57, 2-7/5-7, 5-7/2-7.

[0231] FIGS. 83A-B show 2-7/5-7 bispecific antibody and parental antibodies activities. FIG. 83A shows neutralizing activities against wild-type virus (WA1) at various antibody concentrations for bispecific antibody 2-7/5-7, parental antibodies 2-7, 5-7, and a combination of 2-7 and 5-7 parental antibodies. FIG. 83B shows IC₅₀ concentrations for bispecific antibody 2-7/5-7, parental antibodies 2-7, 5-7, and a combination of 2-7 and 5-7 parental antibodies.

[0232] FIGS. 84A-B show activities of bispecific antibody 2-7/5-7 against SARS-CoV-2 wild-type (WA1) and variant strains B1.1.7 (UK), B1.526 (New York), B1.351 (South Africa) and P.1 (Brazil). FIG. 84A shows neutralization activity of bispecific antibody 2-7/5-7 against various SARS-CoV-2 strains at different antibody concentrations. FIG. 84B shows IC₅₀ and IC₉₀ concentrations for bispecific antibody 2-7/5-7 against various SARS-CoV-2 strains.

[0233] FIGS. 85A-D show neutralization of pseudoviruses having mutations associated with SARS-CoV-2 variants with the bispecific 2-7/5-7 antibody. FIG. 85A shows antibody neutralization curves against circulating SARS-CoV-2 virus variants. FIG. 85B shows antibody potency against circulating SARS-CoV-2 virus variants. FIG. 85C shows antibody neutralization curves against SARS-CoV-2 variants with high frequency mutations. FIG. 85D shows antibody potency against SARS-CoV-2 variants with high frequency mutations.

[0234] FIGS. 86A-F show neutralization of pseudoviruses with SARS-CoV-2 mutations corresponding to “variants of concern” using the bispecific antibody 2-7/5-7. FIG. 86A shows antibody neutralization curves against B.1.1.7 (UK virus variant) with NTD mutations. FIG. 86B shows antibody potency against B.1.1.7 (UK virus variant) with NTD mutations. FIG. 86C shows antibody neutralization curves against B.1.352 (SA) virus variant with NTD mutations. FIG. 86D shows antibody potency against B.1.352 (SA) virus variant with NTD mutations. FIG. 86E shows antibody neutralization curves against P.1 (BZ) virus variant with NTD mutations. FIG. 86F shows antibody potency against P.1 (BZ) virus variant with NTD mutations.

[0235] FIGS. 87A-F show neutralization of pseudoviruses with SARS-CoV-2 mutations corresponding to “variants of interest” using the bispecific antibody 2-7/5-7. FIG. 87A shows antibody neutralization curves against B.1.427 (CA) virus variant with NTD mutations. FIG. 87B shows antibody potency against B.1.427 (CA) virus variant with NTD mutations. FIG. 87C shows antibody neutralization curves against B.1.526 (NY) variant with NTD mutations.

[0236] FIG. 87D shows antibody potency against B.1.526 (NY) variant with NTD mutations. FIG. 87E show antibody neuralization curves against NJ variant with NTD mutations. FIG. 87F show antibody potency against NJ variant with NTD mutations.

[0237] FIG. 88 shows summary of bispecific antibody 2-7/5-7 activity against variants. IC50 is shown in circles. IC90 is shown in squares.

[0238] FIGS. 89A-C shows neutralization activity of bispecific antibody 2-7/5-7 and parental 2-7 and 5-7 monoclonal antibodies against SARS-CoV-2 variants (live viruses). FIG. 89A shows the neutralization curve for bispecific antibody 2-7/5-7. FIG. 89B shows the neutralization curve for parental antibody 2-7. FIG. 89C shows the neutralization curve for parental antibody 5-7.

[0239] FIGS. 90A-D show virus neutralization with monoclonal antibody 2-36. FIG. 90A shows screening of transfection supernatant for neutralization activity against SARS-CoV-2 pseudovirus. FIG. 90B shows screening of transfection supernatant for neutralization activity against SARS-CoV pseudovirus. FIG. 90C shows 2-36 neutralization IC50 (μg/mL) against SARS-CoV-2 pseudovirus (PV) and live virus (LV). FIG. 90D shows 2-36 neutralization IC50 (μg/mL) against SARS-CoV pseudovirus (PV) and live virus (LV).

[0240] FIGS. 91A-B show binding of monoclonal antibody 2-36 to SARS-CoV-2 (FIG. 91A) and SARS-CoV (FIG. 91B) spike as determined by ELISA.

[0241] FIGS. 92A-H show binding affinity for monoclonal antibodies 2-36 and 2-4 to SARS-CoV-2 and SARS-CoV viruses as measured by SPR. FIG. 92A shows 2-36 binding affinity to SARS-CoV-2 spike protein. FIG. 92B shows 2-4 binding affinity to SARS-CoV-2 spike protein. FIG. 92C shows 2-36 binding affinity to SARS-CoV spike protein. FIG. 92D shows 2-4 binding affinity to SARS-CoV spike protein. FIG. 92E shows 2-36 binding affinity to SARS-CoV-2 receptor binding domain (RBD). FIG. 92F shows 2-4 binding affinity to SARS-CoV-2 RBD. FIG. 92G shows 2-36 binding affinity to SARS-CoV RBD. FIG. 92H shows 2-4 binding affinity to SARS-CoV RBD.

[0242] FIGS. 93A-B show binding to SARS-CoV-2 spike protein. FIG. 93A shows that binding of monoclonal antibody 2-36 to SARS-CoV-2 spike is inhibited by CR3022. FIG. 93B shows that monoclonal antibody 2-36 inhibits hACE2 binding to SARS-CoV-2 spike protein.

[0243] FIG. 94 shows conservation analysis on the RBD among SARS CoV-2, SARS CoV-1, Bat CoVs, and Human CoVs virus strains. The analysis shows that the 2-36 binding site is highly conserved; with regions of high conservation in grey and low conservation in red. The 2-36 binding site is outlined in blue.

[0244] FIGS. 95A-D show that monoclonal antibody 2-36 neutralizes SARS-CoV-2 variants and SARS-like coronaviruses using hACE2. FIG. 95A shows neutralization against live variants. FIG. 95B shows neutralization against pseudovariants. FIG. 95C shows evolution tree of viruses. FIG. 95D shows antibody potency against viruses.

[0245] FIGS. 96A-D shows that monoclonal antibody 2-36 neutralizes SARS-like coronaviruses using hACE2. FIG. 96A shows virus neutralization with 2-36 antibody. FIG. 96B shows virus neutralization with S309 antibody. FIG. 96C shows virus neutralization with COVA1-16 antibody. FIG. 96D shows virus neutralization with CR3022 antibody.

[0246] FIGS. 97A-D show in vitro selection of 2-36 antibody escape mutations. FIG. 97A shows evolution of escape mutations during in vitro passage of SARS-CoV-2 USA/WA1 in Vero E6 cells in the presence of 2-36. FIG. 97B shows 2-36 neutralization activity tested against virus passages. FIG. 97C shows spike protein with selected mutation localized. FIG. 97D shows that the selected escape mutations were introduced into pseudoviruses and then 2-36 neutralization activity was tested against these viruses.

### DETAILED DESCRIPTION OF THE INVENTION

### Definitions

[0247] The following are definitions of terms used in the present specification. The initial definition provided for a group or term herein applies to that group or term throughout the present specification individually or as part of another group, unless otherwise indicated. Unless otherwise defined, all technical and scientific terms used herein have the same meaning as commonly understood by one of ordinary skill in the art.

[0248] The singular forms “a”, “an” and “the” include plural reference unless the context clearly dictates otherwise. The use of the word “a” or “an” when used in conjunction with the term “comprising” in the claims and/or the specification may mean “one,” but it is also consistent with the meaning of “one or more,” “at least one,” and “one or more than one.”

[0249] As used herein the term “about” is used herein to mean approximately, roughly, around, or in the region of. When the term “about” is used in conjunction with a numerical range, it modifies that range by extending the boundaries above and below the numerical values set forth. In general, the term “about” is used herein to modify a numerical value above and below the stated value by a variance of 20 percent up or down (higher or lower).

[0250] As used herein, the term “subject” refers to a vertebrate animal. In one embodiment, the subject is a mammal or a mammalian species. In one embodiment, the subject is a human. In one embodiment, the subject is a healthy human adult. In other embodiments, the subject is a non-human vertebrate animal, including, without limitation, non-human primates, laboratory animals, livestock, racehorses, domesticated animals, and non-domesticated animals. In one embodiment, the term “human subjects” means a population of healthy human adults.

[0251] As used herein, the term “patient” refers to a human or animal.

[0252] The term “mammal” includes, but is not limited to, a human, mouse, rat, guinea pig, dog, cat, horse, cow, pig, or non-human primate, such as a monkey, chimpanzee, baboon or rhesus. In one embodiment, the mammal is a human.

[0253] As used herein, the term “therapeutically effective” includes prophylaxis, as well as treatment of a subject having suspected of having a viral infection.

[0254] In certain aspects, the invention provides a bispecific molecule comprising a first polypeptide chain and a second polypeptide chain, wherein: the first polypeptide chain comprises: a first light chain comprising a variable domain and a constant domain; a first heavy chain comprising a variable domain and a constant domain; the second polypeptide chain comprises: a second light chain comprising a variable domain and a constant domain; and a second heavy chain comprising a variable domain and a constant domain.

[0255] In some embodiments, the first polypeptide chain and the second polypeptide chain are covalently bonded to one another. In some embodiments, the first heavy chain comprises a polypeptide sequence which is at least 60%, 62%, 65%, 67%, 70%, 72%, 75%, 77%, 80%, 82%, 85%, 87%, 90%, 92%, 95%, 97%, 98%, 99% identical to SEQ ID NO: 59 or a polypeptide sequence which is at least 60%, 62%, 65%, 67%, 70%, 72%, 75%, 77%, 80%, 82%, 85%, 87%, 90%, 92%, 95%, 97%, 98%, 99% identical to SEQ ID NO: 63. In some embodiments, the first light chain comprises a polypeptide sequence which is at least 60%, 62%, 65%, 67%, 70%, 72%, 75%, 77%, 80%, 82%, 85%, 87%, 90%, 92%, 95%, 97%, 98%, 99% identical to SEQ ID NO: 60 or a polypeptide sequence which is at least 60%, 62%, 65%, 67%, 70%, 72%, 75%, 77%, 80%, 82%, 85%, 87%, 90%, 92%, 95%, 97%, 98%, 99% identical to SEQ ID NO: 64. In some embodiments, the second heavy chain comprises a polypeptide sequence which is at least 60%, 62%, 65%, 67%, 70%, 72%, 75%, 77%, 80%, 82%, 85%, 87%, 90%, 92%, 95%, 97%, 98%, 99% identical to SEQ ID NO: 61 or a polypeptide sequence which is at least 60%, 62%, 65%, 67%, 70%, 72%, 75%, 77%, 80%, 82%, 85%, 87%, 90%, 92%, 95%, 97%, 98%, 99% identical to SEQ ID NO: 65. In some embodiments, the second light chain comprises a polypeptide sequence which is at least 60%, 62%, 65%, 67%, 70%, 72%, 75%, 77%, 80%, 82%, 85%, 87%, 90%, 92%, 95%, 97%, 98%, 99% identical to SEQ ID NO: 62 or a polypeptide sequence which is at least 60%, 62%, 65%, 67%, 70%, 72%, 75%, 77%, 80%, 82%, 85%, 87%, 90%, 92%, 95%, 97%, 98%, 99% identical to SEQ ID NO: 66.

[0256] In some embodiments, the first heavy chain comprises SEQ ID NO: 59 or SEQ ID NO: 63. In some embodiments, the first light chain comprises SEQ ID NO: 60 or SEQ ID NO: 64. In some embodiments, the second heavy chain comprises SEQ ID NO: 61 or SEQ ID NO: 65. In some embodiments, the second light chain comprises SEQ ID NO: 62 or SEQ ID NO: 66.

[0257] In some embodiments, the variable domain of the first heavy chain comprises CDR1, CDR2, and CDR3 of SEQ ID NO: 59 or CDR1, CDR2, and CDR3 of SEQ ID NO: 63. In some embodiments, the variable domain of the first light chain comprises CDR1, CDR2, and CDR3 of SEQ ID NO: 60 or CDR1, CDR2, and CDR3 of SEQ ID NO: 64. In some embodiments, the variable domain of the second heavy chain comprises CDR1, CDR2, and CDR3 of SEQ ID NO: 61 or CDR1, CDR2, and CDR3 of SEQ ID NO: 65. In some embodiments, the variable domain of the second light chain comprises CDR1, CDR2, and CDR3 SEQ ID NO: 62 or CDR1, CDR2, and CDR3 of SEQ ID NO: 66.

[0258] In some embodiments, the variable domain of the first heavy chain comprises a polypeptide sequence which is at least 60%, 62%, 65%, 67%, 70%, 72%, 75%, 77%, 80%, 82%, 85%, 87%, 90%, 92%, 95%, 97%, 98%, 99% identical to SEQ ID NO: 13 or a polypeptide sequence which is at least 60%, 62%, 65%, 67%, 70%, 72%, 75%, 77%, 80%, 82%, 85%, 87%, 90%, 92%, 95%, 97%, 98%, 99% identical to SEQ ID NO: 27. In some embodiments, the variable domain of the first light chain comprises a polypeptide sequence which is at least 60%, 62%, 65%, 67%, 70%, 72%, 75%, 77%, 80%, 82%, 85%, 87%, 90%, 92%, 95%, 97%, 98%, 99% identical to SEQ ID NO: 14 or a polypeptide sequence which is at least 60%, 62%, 65%, 67%, 70%, 72%, 75%, 77%, 80%, 82%, 85%, 87%, 90%, 92%, 95%, 97%, 98%, 99% identical to SEQ ID NO: 28. In some embodiments, the variable domain of the second heavy chain comprises a polypeptide sequence which is at least 60%, 62%, 65%, 67%, 70%, 72%, 75%, 77%, 80%, 82%, 85%, 87%, 90%, 92%, 95%, 97%, 98%, 99% identical to SEQ ID NO: 27 or a polypeptide sequence which is at least 60%, 62%, 65%, 67%, 70%, 72%, 75%, 77%, 80%, 82%, 85%, 87%, 90%, 92%, 95%, 97%, 98%, 99% identical to SEQ ID NO: 13. In some embodiments, the variable domain of the second light chain comprises a polypeptide sequence which is at least 60%, 62%, 65%, 67%, 70%, 72%, 75%, 77%, 80%, 82%, 85%, 87%, 90%, 92%, 95%, 97%, 98%, 99% identical to SEQ ID NO: 28 or a polypeptide sequence which is at least 60%, 62%, 65%, 67%, 70%, 72%, 75%, 77%, 80%, 82%, 85%, 87%, 90%, 92%, 95%, 97%, 98%, 99% identical to SEQ ID NO: 14.

[0259] In some embodiments, the variable domain of the first heavy chain comprises SEQ ID NO: 13 or SEQ ID NO: 27. In some embodiments, the variable domain of the first light chain comprises SEQ ID NO: 14 or SEQ ID NO: 28. In some embodiments, the variable domain of the second heavy chain comprises SEQ ID NO: 27 or SEQ ID NO: 13. In some embodiments, the variable domain of the second light chain comprises SEQ ID NO: 28 or SEQ ID NO: 14.

[0260] In some embodiments, the molecule comprises a polypeptide sequence which is at least 60%, 62%, 65%, 67%, 70%, 72%, 75%, 77%, 80%, 82%, 85%, 87%, 90%, 92%, 95%, 97%, 98%, 99% identical to SEQ ID NOs: 59, a polypeptide sequence which is at least 60%, 62%, 65%, 67%, 70%, 72%, 75%, 77%, 80%, 82%, 85%, 87%, 90%, 92%, 95%, 97%, 98%, 99% identical to SEQ ID NO: 60, a polypeptide sequence which is at least 60%, 62%, 65%, 67%, 70%, 72%, 75%, 77%, 80%, 82%, 85%, 87%, 90%, 92%, 95%, 97%, 98%, 99% identical to SEQ ID NO: 61, and a polypeptide sequence which is at least 60%, 62%, 65%, 67%, 70%, 72%, 75%, 77%, 80%, 82%, 85%, 87%, 90%, 92%, 95%, 97%, 98%, 99% identical to SEQ ID NO: 62. In some embodiments, the molecule comprises a polypeptide sequence which is at least 60%, 62%, 65%, 67%, 70%, 72%, 75%, 77%, 80%, 82%, 85%, 87%, 90%, 92%, 95%, 97%, 98%, 99% identical to SEQ ID NOs: 63, a polypeptide sequence which is at least 60%, 62%, 65%, 67%, 70%, 72%, 75%, 77%, 80%, 82%, 85%, 87%, 90%, 92%, 95%, 97%, 98%, 99% identical to SEQ ID NO: 64, a polypeptide sequence which is at least 60%, 62%, 65%, 67%, 70%, 72%, 75%, 77%, 80%, 82%, 85%, 87%, 90%, 92%, 95%, 97%, 98%, 99% identical to SEQ ID NO: 65, and a polypeptide sequence which is at least 60%, 62%, 65%, 67%, 70%, 72%, 75%, 77%, 80%, 82%, 85%, 87%, 90%, 92%, 95%, 97%, 98%, 99% identical to SEQ ID NO: 66. In some embodiments, the molecule comprises a polypeptide sequence which is at least 60%, 62%, 65%, 67%, 70%, 72%, 75%, 77%, 80%, 82%, 85%, 87%, 90%, 92%, 95%, 97%, 98%, 99% identical to SEQ ID NOs: 13, a polypeptide sequence which is at least 60%, 62%, 65%, 67%, 70%, 72%, 75%, 77%, 80%, 82%, 85%, 87%, 90%, 92%, 95%, 97%, 98%, 99% identical to SEQ ID NO: 14, a polypeptide sequence which is at least 60%, 62%, 65%, 67%, 70%, 72%, 75%, 77%, 80%, 82%, 85%, 87%, 90%, 92%, 95%, 97%, 98%, 99% identical to SEQ ID NO: 27, and a polypeptide sequence which is at least 60%, 62%, 65%, 67%, 70%, 72%, 75%, 77%, 80%, 82%, 85%, 87%, 90%, 92%, 95%, 97%, 98%, 99% identical to SEQ ID NO: 28.

[0261] In some embodiments, the molecule comprises SEQ ID NOs: 59, 60, 61, and 62. In some embodiments, the molecule comprises SEQ ID NOs: 63, 64, 65, and 66. In some embodiments, the molecule comprises SEQ ID NOs: 13, 14, 27, and 28.

[0262] In some embodiments, the molecule further comprises one or more disulfide bonds. In some embodiments, the molecule further comprises one or more linker sequences. In some embodiments, the molecule is capable of neutralizing a coronavirus. In some embodiments, the coronavirus is a SARS-CoV-2 virus strain. In some embodiments, the molecule specifically recognizes a first epitope and a second epitope on a SARS-CoV-2 particle. In some embodiments, the first epitope comprises at least a portion of a receptor binding domain (RBD) on an S protein of a SARS-CoV-2 particle. In some embodiments, the second epitope comprises at least a portion of a N-terminal domain (NTD) on an S protein of a SARS-CoV-2 particle.

[0263] In certain aspects, the invention provides a method of treating a COVID-19 infection in a subject in need thereof, the method comprising administering to the subject a composition comprising a bispecific molecule, wherein the bispecific molecule comprises a first polypeptide chain and a second polypeptide chain, wherein: the first polypeptide chain comprises: a first light chain comprising a variable domain and a constant domain; a first heavy chain comprising a variable domain and a constant domain; the second polypeptide chain comprises: a second light chain comprising a variable domain and a constant domain; and a second heavy chain comprising a variable domain and a constant domain.

[0264] In some embodiments, the first polypeptide chain and the second polypeptide chain are covalently bonded to one another. In some embodiments, the first heavy chain comprises a polypeptide sequence which is at least 60%, 62%, 65%, 67%, 70%, 72%, 75%, 77%, 80%, 82%, 85%, 87%, 90%, 92%, 95%, 97%, 98%, 99% identical to SEQ ID NO: 59 or a polypeptide sequence which is at least 60%, 62%, 65%, 67%, 70%, 72%, 75%, 77%, 80%, 82%, 85%, 87%, 90%, 92%, 95%, 97%, 98%, 99% identical to SEQ ID NO: 63. In some embodiments, the first light chain comprises a polypeptide sequence which is at least 60%, 62%, 65%, 67%, 70%, 72%, 75%, 77%, 80%, 82%, 85%, 87%, 90%, 92%, 95%, 97%, 98%, 99% identical to SEQ ID NO: 60 or a polypeptide sequence which is at least 60%, 62%, 65%, 67%, 70%, 72%, 75%, 77%, 80%, 82%, 85%, 87%, 90%, 92%, 95%, 97%, 98%, 99% identical to SEQ ID NO: 64. In some embodiments, the second heavy chain comprises a polypeptide sequence which is at least 60%, 62%, 65%, 67%, 70%, 72%, 75%, 77%, 80%, 82%, 85%, 87%, 90%, 92%, 95%, 97%, 98%, 99% identical to SEQ ID NO: 61 or a polypeptide sequence which is at least 60%, 62%, 65%, 67%, 70%, 72%, 75%, 77%, 80%, 82%, 85%, 87%, 90%, 92%, 95%, 97%, 98%, 99% identical to SEQ ID NO: 65. In some embodiments, the second light chain comprises a polypeptide sequence which is at least 60%, 62%, 65%, 67%, 70%, 72%, 75%, 77%, 80%, 82%, 85%, 87%, 90%, 92%, 95%, 97%, 98%, 99% identical to SEQ ID NO: 62 or a polypeptide sequence which is at least 60%, 62%, 65%, 67%, 70%, 72%, 75%, 77%, 80%, 82%, 85%, 87%, 90%, 92%, 95%, 97%, 98%, 99% identical to SEQ ID NO: 66.

[0265] In some embodiments, the first heavy chain comprises SEQ ID NO: 59 or SEQ ID NO: 63. In some embodiments, the first light chain comprises SEQ ID NO: 60 or SEQ ID NO: 64. In some embodiments, the second heavy chain comprises SEQ ID NO: 61 or SEQ ID NO: 65. In some embodiments, the second light chain comprises SEQ ID NO: 62 or SEQ ID NO: 66. In some embodiments, the variable domain of the first heavy chain comprises CDR1, CDR2, and CDR3 of SEQ ID NO: 59 or CDR1, CDR2, and CDR3 of SEQ ID NO: 63. In some embodiments, the variable domain of the first light chain comprises CDR1, CDR2, and CDR3 of SEQ ID NO: 60 or CDR1, CDR2, and CDR3 of SEQ ID NO: 64. In some embodiments, the variable domain of the second heavy chain comprises CDR1, CDR2, and CDR3 of SEQ ID NO: 61 or CDR1, CDR2, and CDR3 of SEQ ID NO: 65. In some embodiments, the variable domain of the second light chain comprises CDR1, CDR2, and CDR3 SEQ ID NO: 62 or CDR1, CDR2, and CDR3 of SEQ ID NO: 66.

[0266] In some embodiments, the variable domain of the first heavy chain comprises a polypeptide sequence which is at least 60%, 62%, 65%, 67%, 70%, 72%, 75%, 77%, 80%, 82%, 85%, 87%, 90%, 92%, 95%, 97%, 98%, 99% identical to SEQ ID NO: 13 or a polypeptide sequence which is at least 60%, 62%, 65%, 67%, 70%, 72%, 75%, 77%, 80%, 82%, 85%, 87%, 90%, 92%, 95%, 97%, 98%, 99% identical to SEQ ID NO: 27. In some embodiments, the variable domain of the first light chain comprises a polypeptide sequence which is at least 60%, 62%, 65%, 67%, 70%, 72%, 75%, 77%, 80%, 82%, 85%, 87%, 90%, 92%, 95%, 97%, 98%, 99% identical to SEQ ID NO: 14 or a polypeptide sequence which is at least 60%, 62%, 65%, 67%, 70%, 72%, 75%, 77%, 80%, 82%, 85%, 87%, 90%, 92%, 95%, 97%, 98%, 99% identical to SEQ ID NO: 28. In some embodiments, the variable domain of the second heavy chain comprises a polypeptide sequence which is at least 60%, 62%, 65%, 67%, 70%, 72%, 75%, 77%, 80%, 82%, 85%, 87%, 90%, 92%, 95%, 97%, 98%, 99% identical to SEQ ID NO: 27 or a polypeptide sequence which is at least 60%, 62%, 65%, 67%, 70%, 72%, 75%, 77%, 80%, 82%, 85%, 87%, 90%, 92%, 95%, 97%, 98%, 99% identical to SEQ ID NO: 13. In some embodiments, the variable domain of the second light chain comprises a polypeptide sequence which is at least 60%, 62%, 65%, 67%, 70%, 72%, 75%, 77%, 80%, 82%, 85%, 87%, 90%, 92%, 95%, 97%, 98%, 99% identical to SEQ ID NO: 28 or a polypeptide sequence which is at least 60%, 62%, 65%, 67%, 70%, 72%, 75%, 77%, 80%, 82%, 85%, 87%, 90%, 92%, 95%, 97%, 98%, 99% identical to SEQ ID NO: 14.

[0267] In some embodiments, the variable domain of the first heavy chain comprises SEQ ID NO: 13 or SEQ ID NO: 27. In some embodiments, the variable domain of the first light chain comprises SEQ ID NO: 14 or SEQ ID NO: 28. In some embodiments, the variable domain of the second heavy chain comprises SEQ ID NO: 27 or SEQ ID NO: 13. In some embodiments, the variable domain of the second light chain comprises SEQ ID NO: 28 or SEQ ID NO: 14.

[0268] In some embodiments, the molecule comprises a polypeptide sequence which is at least 60%, 62%, 65%, 67%, 70%, 72%, 75%, 77%, 80%, 82%, 85%, 87%, 90%, 92%, 95%, 97%, 98%, 99% identical to SEQ ID NOs: 59, a polypeptide sequence which is at least 60%, 62%, 65%, 67%, 70%, 72%, 75%, 77%, 80%, 82%, 85%, 87%, 90%, 92%, 95%, 97%, 98%, 99% identical to SEQ ID NO: 60, a polypeptide sequence which is at least 60%, 62%, 65%, 67%, 70%, 72%, 75%, 77%, 80%, 82%, 85%, 87%, 90%, 92%, 95%, 97%, 98%, 99% identical to SEQ ID NO: 61, and a polypeptide sequence which is at least 60%, 62%, 65%, 67%, 70%, 72%, 75%, 77%, 80%, 82%, 85%, 87%, 90%, 92%, 95%, 97%, 98%, 99% identical to SEQ ID NO: 62. In some embodiments, the molecule comprises a polypeptide sequence which is at least 60%, 62%, 65%, 67%, 70%, 72%, 75%, 77%, 80%, 82%, 85%, 87%, 90%, 92%, 95%, 97%, 98%, 99% identical to SEQ ID NOs: 63, a polypeptide sequence which is at least 60%, 62%, 65%, 67%, 70%, 72%, 75%, 77%, 80%, 82%, 85%, 87%, 90%, 92%, 95%, 97%, 98%, 99% identical to SEQ ID NO: 64, a polypeptide sequence which is at least 60%, 62%, 65%, 67%, 70%, 72%, 75%, 77%, 80%, 82%, 85%, 87%, 90%, 92%, 95%, 97%, 98%, 99% identical to SEQ ID NO: 65, and a polypeptide sequence which is at least 60%, 62%, 65%, 67%, 70%, 72%, 75%, 77%, 80%, 82%, 85%, 87%, 90%, 92%, 95%, 97%, 98%, 99% identical to SEQ ID NO: 66. In some embodiments, the molecule comprises a polypeptide sequence which is at least 60%, 62%, 65%, 67%, 70%, 72%, 75%, 77%, 80%, 82%, 85%, 87%, 90%, 92%, 95%, 97%, 98%, 99% identical to SEQ ID NOs: 13, a polypeptide sequence which is at least 60%, 62%, 65%, 67%, 70%, 72%, 75%, 77%, 80%, 82%, 85%, 87%, 90%, 92%, 95%, 97%, 98%, 99% identical to SEQ ID NO: 14, a polypeptide sequence which is at least 60%, 62%, 65%, 67%, 70%, 72%, 75%, 77%, 80%, 82%, 85%, 87%, 90%, 92%, 95%, 97%, 98%, 99% identical to SEQ ID NO: 27, and a polypeptide sequence which is at least 60%, 62%, 65%, 67%, 70%, 72%, 75%, 77%, 80%, 82%, 85%, 87%, 90%, 92%, 95%, 97%, 98%, 99% identical to SEQ ID NO: 28.

[0269] In some embodiments, the molecule comprises SEQ ID NOs: 59, 60, 61, and 62. In some embodiments, the molecule comprises SEQ ID NOs: 63, 64, 65, and 66. In some embodiments, the molecule comprises SEQ ID NOs: 13, 14, 27, and 28.

[0270] In some embodiments, the molecule further comprises one or more disulfide bonds. In some embodiments, the molecule further comprises one or more linker sequences. In some embodiments, the molecule is capable of neutralizing a coronavirus. In some embodiments, the coronavirus is a SARS-CoV-2 virus strain. In some embodiments, the molecule specifically recognizes a first epitope and a second epitope on a SARS-CoV-2 particle. In some embodiments, the first epitope comprises at least a portion of a receptor binding domain (RBD) on a spike protein of a SARS-CoV-2 particle. In some embodiments, the second epitope comprises at least a portion of a N-terminal domain (NTD) on a spike protein of a SARS-CoV-2 particle. In some embodiments, the composition is administered in combination with a second therapeutic agent.

[0271] In certain aspects, the invention provides a method of preventing a COVID-19 infection in a subject in need thereof, the method comprising administering to the subject a composition comprising a bispecific molecule, wherein the bispecific molecule comprises a first polypeptide chain and a second polypeptide chain, wherein: the first polypeptide chain comprises: a first light chain comprising a variable domain and a constant domain; a first heavy chain comprising a variable domain and a constant domain; the second polypeptide chain comprises: a second light chain comprising a variable domain and a constant domain; and a second heavy chain comprising a variable domain and a constant domain.

[0272] In some embodiments, the first polypeptide chain and the second polypeptide chain are covalently bonded to one another. In some embodiments, the first heavy chain comprises a polypeptide sequence which is at least 60%, 62%, 65%, 67%, 70%, 72%, 75%, 77%, 80%, 82%, 85%, 87%, 90%, 92%, 95%, 97%, 98%, 99% identical to SEQ ID NO: 59 or a polypeptide sequence which is at least 60%, 62%, 65%, 67%, 70%, 72%, 75%, 77%, 80%, 82%, 85%, 87%, 90%, 92%, 95%, 97%, 98%, 99% identical to SEQ ID NO: 63. In some embodiments, the first light chain comprises a polypeptide sequence which is at least 60%, 62%, 65%, 67%, 70%, 72%, 75%, 77%, 80%, 82%, 85%, 87%, 90%, 92%, 95%, 97%, 98%, 99% identical to SEQ ID NO: 60 or a polypeptide sequence which is at least 60%, 62%, 65%, 67%, 70%, 72%, 75%, 77%, 80%, 82%, 85%, 87%, 90%, 92%, 95%, 97%, 98%, 99% identical to SEQ ID NO: 64. In some embodiments, the second heavy chain comprises a polypeptide sequence which is at least 60%, 62%, 65%, 67%, 70%, 72%, 75%, 77%, 80%, 82%, 85%, 87%, 90%, 92%, 95%, 97%, 98%, 99% identical to SEQ ID NO: 61 or a polypeptide sequence which is at least 60%, 62%, 65%, 67%, 70%, 72%, 75%, 77%, 80%, 82%, 85%, 87%, 90%, 92%, 95%, 97%, 98%, 99% identical to SEQ ID NO: 65. In some embodiments, the second light chain comprises a polypeptide sequence which is at least 60%, 62%, 65%, 67%, 70%, 72%, 75%, 77%, 80%, 82%, 85%, 87%, 90%, 92%, 95%, 97%, 98%, 99% identical to SEQ ID NO: 62 or a polypeptide sequence which is at least 60%, 62%, 65%, 67%, 70%, 72%, 75%, 77%, 80%, 82%, 85%, 87%, 90%, 92%, 95%, 97%, 98%, 99% identical to SEQ ID NO: 66.

[0273] In some embodiments, the first heavy chain comprises SEQ ID NO: 59 or SEQ ID NO: 63. In some embodiments, the first light chain comprises SEQ ID NO: 60 or SEQ ID NO: 64. In some embodiments, the second heavy chain comprises SEQ ID NO: 61 or SEQ ID NO: 65. In some embodiments, the second light chain comprises SEQ ID NO: 62 or SEQ ID NO: 66.

[0274] In some embodiments, the variable domain of the first heavy chain comprises CDR1, CDR2, and CDR3 of SEQ ID NO: 59 or CDR1, CDR2, and CDR3 of SEQ ID NO: 63. In some embodiments, the variable domain of the first light chain comprises CDR1, CDR2, and CDR3 of SEQ ID NO: 60 or CDR1, CDR2, and CDR3 of SEQ ID NO: 64. In some embodiments, the variable domain of the second heavy chain comprises CDR1, CDR2, and CDR3 of SEQ ID NO: 61 or CDR1, CDR2, and CDR3 of SEQ ID NO: 65. In some embodiments, the variable domain of the second light chain comprises CDR1, CDR2, and CDR3 SEQ ID NO: 62 or CDR1, CDR2, and CDR3 of SEQ ID NO: 66.

[0275] In some embodiments, the variable domain of the first heavy chain comprises a polypeptide sequence which is at least 60%, 62%, 65%, 67%, 70%, 72%, 75%, 77%, 80%, 82%, 85%, 87%, 90%, 92%, 95%, 97%, 98%, 99% identical to SEQ ID NO: 13 or a polypeptide sequence which is at least 60%, 62%, 65%, 67%, 70%, 72%, 75%, 77%, 80%, 82%, 85%, 87%, 90%, 92%, 95%, 97%, 98%, 99% identical to SEQ ID NO: 27. In some embodiments, the variable domain of the first light chain comprises a polypeptide sequence which is at least 60%, 62%, 65%, 67%, 70%, 72%, 75%, 77%, 80%, 82%, 85%, 87%, 90%, 92%, 95%, 97%, 98%, 99% identical to SEQ ID NO: 14 or a polypeptide sequence which is at least 60%, 62%, 65%, 67%, 70%, 72%, 75%, 77%, 80%, 82%, 85%, 87%, 90%, 92%, 95%, 97%, 98%, 99% identical to SEQ ID NO: 28. In some embodiments, the variable domain of the second heavy chain comprises a polypeptide sequence which is at least 60%, 62%, 65%, 67%, 70%, 72%, 75%, 77%, 80%, 82%, 85%, 87%, 90%, 92%, 95%, 97%, 98%, 99% identical to SEQ ID NO: 27 or a polypeptide sequence which is at least 60%, 62%, 65%, 67%, 70%, 72%, 75%, 77%, 80%, 82%, 85%, 87%, 90%, 92%, 95%, 97%, 98%, 99% identical to SEQ ID NO: 13. In some embodiments, the variable domain of the second light chain comprises a polypeptide sequence which is at least 60%, 62%, 65%, 67%, 70%, 72%, 75%, 77%, 80%, 82%, 85%, 87%, 90%, 92%, 95%, 97%, 98%, 99% identical to SEQ ID NO: 28 or a polypeptide sequence which is at least 60%, 62%, 65%, 67%, 70%, 72%, 75%, 77%, 80%, 82%, 85%, 87%, 90%, 92%, 95%, 97%, 98%, 99% identical to SEQ ID NO: 14.

[0276] In some embodiments, the variable domain of the first heavy chain comprises SEQ ID NO: 13 or SEQ ID NO: 27. In some embodiments, the variable domain of the first light chain comprises SEQ ID NO: 14 or SEQ ID NO: 28. In some embodiments, the variable domain of the second heavy chain comprises SEQ ID NO: 27 or SEQ ID NO: 13. In some embodiments, the variable domain of the second light chain comprises SEQ ID NO: 28 or SEQ ID NO: 14.

[0277] In some embodiments, the molecule comprises a polypeptide sequence which is at least 60%, 62%, 65%, 67%, 70%, 72%, 75%, 77%, 80%, 82%, 85%, 87%, 90%, 92%, 95%, 97%, 98%, 99% identical to SEQ ID NOs: 59, a polypeptide sequence which is at least 60%, 62%, 65%, 67%, 70%, 72%, 75%, 77%, 80%, 82%, 85%, 87%, 90%, 92%, 95%, 97%, 98%, 99% identical to SEQ ID NO: 60, a polypeptide sequence which is at least 60%, 62%, 65%, 67%, 70%, 72%, 75%, 77%, 80%, 82%, 85%, 87%, 90%, 92%, 95%, 97%, 98%, 99% identical to SEQ ID NO: 61, and a polypeptide sequence which is at least 60%, 62%, 65%, 67%, 70%, 72%, 75%, 77%, 80%, 82%, 85%, 87%, 90%, 92%, 95%, 97%, 98%, 99% identical to SEQ ID NO: 62. In some embodiments, the molecule comprises a polypeptide sequence which is at least 60%, 62%, 65%, 67%, 70%, 72%, 75%, 77%, 80%, 82%, 85%, 87%, 90%, 92%, 95%, 97%, 98%, 99% identical to SEQ ID NOs: 63, a polypeptide sequence which is at least 60%, 62%, 65%, 67%, 70%, 72%, 75%, 77%, 80%, 82%, 85%, 87%, 90%, 92%, 95%, 97%, 98%, 99% identical to SEQ ID NO: 64, a polypeptide sequence which is at least 60%, 62%, 65%, 67%, 70%, 72%, 75%, 77%, 80%, 82%, 85%, 87%, 90%, 92%, 95%, 97%, 98%, 99% identical to SEQ ID NO: 65, and a polypeptide sequence which is at least 60%, 62%, 65%, 67%, 70%, 72%, 75%, 77%, 80%, 82%, 85%, 87%, 90%, 92%, 95%, 97%, 98%, 99% identical to SEQ ID NO: 66. In some embodiments, the molecule comprises a polypeptide sequence which is at least 60%, 62%, 65%, 67%, 70%, 72%, 75%, 77%, 80%, 82%, 85%, 87%, 90%, 92%, 95%, 97%, 98%, 99% identical to SEQ ID NOs: 13, a polypeptide sequence which is at least 60%, 62%, 65%, 67%, 70%, 72%, 75%, 77%, 80%, 82%, 85%, 87%, 90%, 92%, 95%, 97%, 98%, 99% identical to SEQ ID NO: 14, a polypeptide sequence which is at least 60%, 62%, 65%, 67%, 70%, 72%, 75%, 77%, 80%, 82%, 85%, 87%, 90%, 92%, 95%, 97%, 98%, 99% identical to SEQ ID NO: 27, and a polypeptide sequence which is at least 60%, 62%, 65%, 67%, 70%, 72%, 75%, 77%, 80%, 82%, 85%, 87%, 90%, 92%, 95%, 97%, 98%, 99% identical to SEQ ID NO: 28.

[0278] In some embodiments, the molecule comprises SEQ ID NOs: 59, 60, 61, and 62. In some embodiments, the molecule comprises SEQ ID NOs: 63, 64, 65, and 66. In some embodiments, the molecule comprises SEQ ID NOs: 13, 14, 27, and 28.

[0279] In some embodiments, the molecule further comprises one or more disulfide bonds. In some embodiments, the molecule further comprises one or more linker sequences. In some embodiments, the molecule is capable of neutralizing a coronavirus. In some embodiments, the coronavirus is a SARS-CoV-2 virus strain. In some embodiments, the molecule specifically recognizes a first epitope and a second epitope on a SARS-CoV-2 particle. In some embodiments, the first epitope comprises at least a portion of a receptor binding domain (RBD) on an S protein of a SARS-CoV-2 particle. In some embodiments, the second epitope comprises at least a portion of a N-terminal domain (NTD) on an S protein of a SARS-CoV-2 particle. In some embodiments, the composition is administered in combination with a second therapeutic agent.

[0280] In certain aspects, the invention provides a synthesized monoclonal antibody, or a functional fragment thereof, comprising a heavy chain having a variable domain and a constant domain and a light chain having a variable domain and a constant domain, wherein the antibody binds an antigen on a coronavirus particle.

[0281] In some embodiments, the heavy chain variable domain comprises a polypeptide sequence which is at least 60%, 62%, 65%, 67%, 70%, 72%, 75%, 77%, 80%, 82%, 85%, 87%, 90%, 92%, 95%, 97%, 98%, 99% identical to SEQ ID NO: 15. In some embodiments, the light chain variable domain comprises a polypeptide sequence which is at least 60%, 62%, 65%, 67%, 70%, 72%, 75%, 77%, 80%, 82%, 85%, 87%, 90%, 92%, 95%, 97%, 98%, 99% identical to SEQ ID NO: 16. In some embodiments, the heavy chain variable domain comprises SEQ ID NO: 15. In some embodiments, the light chain variable domain comprises SEQ ID NO: 16.

[0282] In some embodiments, the antibody comprises a polypeptide sequence which is at least 60%, 62%, 65%, 67%, 70%, 72%, 75%, 77%, 80%, 82%, 85%, 87%, 90%, 92%, 95%, 97%, 98%, 99% identical to SEQ ID NO: 15 and a polypeptide sequence which is at least 60%, 62%, 65%, 67%, 70%, 72%, 75%, 77%, 80%, 82%, 85%, 87%, 90%, 92%, 95%, 97%, 98%, 99% identical to SEQ ID NO: 16. In some embodiments, the antibody comprises SEQ ID NO: 15 and SEQ ID NO: 16.

[0283] In some embodiments, the heavy chain variable domain comprises the CDR1, CDR2, and CDR3 regions of SEQ ID NO: 15. In some embodiments, the light chain variable domain comprises the CDR1, CDR2, and CDR3 regions of SEQ ID NO: 16.

[0284] In some embodiments, the antibody neutralizes a coronavirus. In some embodiments, the coronavirus is SARS-CoV-2. In some embodiments, the antibody specifically binds an epitope on the surface of the coronavirus. In some embodiments, the epitope comprises at least a portion of a coronavirus spike protein. In some embodiments, the at least a portion of a coronavirus spike protein comprises a receptor binding domain (RBD) of a spike protein. In some embodiments, the coronavirus is a SARS-CoV-2 coronavirus.

[0285] In certain aspects, the invention provides a method of treating a COVID-19 infection in a subject in need thereof, the method comprising administering to the subject a therapeutically effective amount of a synthesized monoclonal antibody, or a functional fragment thereof, comprising a heavy chain having a variable domain and a constant domain and a light chain having a variable domain and a constant domain, wherein the antibody binds an antigen on a coronavirus particle.

[0286] In some embodiments, the heavy chain variable domain comprises a polypeptide sequence which is at least 60%, 62%, 65%, 67%, 70%, 72%, 75%, 77%, 80%, 82%, 85%, 87%, 90%, 92%, 95%, 97%, 98%, 99% identical to SEQ ID NO: 15. In some embodiments, the light chain variable domain comprises a polypeptide sequence which is at least 60%, 62%, 65%, 67%, 70%, 72%, 75%, 77%, 80%, 82%, 85%, 87%, 90%, 92%, 95%, 97%, 98%, 99% identical to SEQ ID NO: 16. In some embodiments, the heavy chain variable domain comprises SEQ ID NO: 15. In some embodiments, the light chain variable domain comprises SEQ ID NO: 16.

[0287] In some embodiments, the antibody comprises a polypeptide sequence which is at least 60%, 62%, 65%, 67%, 70%, 72%, 75%, 77%, 80%, 82%, 85%, 87%, 90%, 92%, 95%, 97%, 98%, 99% identical to SEQ ID NO: 15 and a polypeptide sequence which is at least 60%, 62%, 65%, 67%, 70%, 72%, 75%, 77%, 80%, 82%, 85%, 87%, 90%, 92%, 95%, 97%, 98%, 99% identical to SEQ ID NO: 16. In some embodiments, the antibody comprises SEQ ID NO: 15 and SEQ ID NO: 16.

[0288] In some embodiments, the heavy chain variable domain comprises the CDR1, CDR2, and CDR3 regions of SEQ ID NO: 15. In some embodiments, the light chain variable domain comprises the CDR1, CDR2, and CDR3 regions of SEQ ID NO: 16.

[0289] In some embodiments, the antibody neutralizes a coronavirus. In some embodiments, the coronavirus is SARS-CoV-2. In some embodiments, the antibody neutralizes a coronavirus. In some embodiments, the coronavirus is SARS-CoV-2. In some embodiments, the antibody specifically binds an epitope on the surface of the coronavirus. In some embodiments, the epitope comprises at least a portion of a coronavirus spike protein. In some embodiments, the at least a portion of a coronavirus spike protein comprises a receptor binding domain (RBD) of a spike protein. In some embodiments, the coronavirus is a SARS-CoV-2 coronavirus. In some embodiments, the antibody is administered in combination with a second pharmaceutical agent.

[0290] In certain aspects, the invention provides a method of preventing a COVID-19 infection in a subject in need thereof, the method comprising administering to the subject a therapeutically effective amount of a synthesized monoclonal antibody, or a functional fragment thereof, comprising a heavy chain having a variable domain and a constant domain and a light chain having a variable and a constant domain, wherein the antibody binds an antigen on a coronavirus particle.

[0291] In some embodiments, the heavy chain variable domain comprises a polypeptide sequence which is at least 60%, 62%, 65%, 67%, 70%, 72%, 75%, 77%, 80%, 82%, 85%, 87%, 90%, 92%, 95%, 97%, 98%, 99% identical to SEQ ID NO: 15. In some embodiments, the light chain variable domain comprises a polypeptide sequence which is at least 60%, 62%, 65%, 67%, 70%, 72%, 75%, 77%, 80%, 82%, 85%, 87%, 90%, 92%, 95%, 97%, 98%, 99% identical to SEQ ID NO: 16. In some embodiments, the heavy chain variable domain comprises SEQ ID NO: 15. In some embodiments, the light chain variable domain comprises SEQ ID NO: 16.

[0292] In some embodiments, the antibody comprises a polypeptide sequence which is at least 60%, 62%, 65%, 67%, 70%, 72%, 75%, 77%, 80%, 82%, 85%, 87%, 90%, 92%, 95%, 97%, 98%, 99% identical to SEQ ID NO: 15 and a polypeptide sequence which is at least 60%, 62%, 65%, 67%, 70%, 72%, 75%, 77%, 80%, 82%, 85%, 87%, 90%, 92%, 95%, 97%, 98%, 99% identical to SEQ ID NO: 16. In some embodiments, the antibody comprises SEQ ID NO: 15 and SEQ ID NO: 16.

[0293] In some embodiments, the heavy chain variable domain comprises the CDR1, CDR2, and CDR3 regions of SEQ ID NO: 15. In some embodiments, the light chain variable domain comprises the CDR1, CDR2, and CDR3 regions of SEQ ID NO: 16.

[0294] In some embodiments, the antibody neutralizes a coronavirus. In some embodiments, the coronavirus is SARS-CoV-2. In some embodiments, the antibody neutralizes a coronavirus. In some embodiments, the coronavirus is SARS-CoV-2. In some embodiments, the antibody specifically binds an epitope on the surface of the coronavirus. In some embodiments, the epitope comprises at least a portion of a coronavirus spike protein. In some embodiments, the at least a portion of a coronavirus spike protein comprises a receptor binding domain (RBD) of a spike protein. In some embodiments, the coronavirus is a SARS-CoV-2 coronavirus. In some embodiments, the antibody is administered in combination with a second pharmaceutical agent.

[0295] In certain aspects, the invention provides a synthesized monoclonal antibody, or a functional fragment thereof, comprising a heavy chain having a variable domain and a constant domain and a light chain having a variable domain and a constant domain, wherein the antibody binds an antigen on a coronavirus particle.

[0296] In some embodiments, the heavy chain variable domain comprises a polypeptide sequence which is at least 60%, 62%, 65%, 67%, 70%, 72%, 75%, 77%, 80%, 82%, 85%, 87%, 90%, 92%, 95%, 97%, 98%, 99% identical to SEQ ID NO: 3, a polypeptide sequence which is at least 60%, 62%, 65%, 67%, 70%, 72%, 75%, 77%, 80%, 82%, 85%, 87%, 90%, 92%, 95%, 97%, 98%, 99% identical to SEQ ID NO: 7, a polypeptide sequence which is at least 60%, 62%, 65%, 67%, 70%, 72%, 75%, 77%, 80%, 82%, 85%, 87%, 90%, 92%, 95%, 97%, 98%, 99% identical to SEQ ID NO: 9, a polypeptide sequence which is at least 60%, 62%, 65%, 67%, 70%, 72%, 75%, 77%, 80%, 82%, 85%, 87%, 90%, 92%, 95%, 97%, 98%, 99% identical to SEQ ID NO: 11, or a polypeptide sequence which is at least 60%, 62%, 65%, 67%, 70%, 72%, 75%, 77%, 80%, 82%, 85%, 87%, 90%, 92%, 95%, 97%, 98%, 99% identical to SEQ ID NO: 17.

[0297] In some embodiments, the heavy chain variable domain comprises a polypeptide sequence which is at least 60%, 62%, 65%, 67%, 70%, 72%, 75%, 77%, 80%, 82%, 85%, 87%, 90%, 92%, 95%, 97%, 98%, 99% identical to SEQ ID NO: 19, a polypeptide sequence which is at least 60%, 62%, 65%, 67%, 70%, 72%, 75%, 77%, 80%, 82%, 85%, 87%, 90%, 92%, 95%, 97%, 98%, 99% identical to SEQ ID NO: 21, a polypeptide sequence which is at least 60%, 62%, 65%, 67%, 70%, 72%, 75%, 77%, 80%, 82%, 85%, 87%, 90%, 92%, 95%, 97%, 98%, 99% identical to SEQ ID NO: 25, a polypeptide sequence which is at least 60%, 62%, 65%, 67%, 70%, 72%, 75%, 77%, 80%, 82%, 85%, 87%, 90%, 92%, 95%, 97%, 98%, 99% identical to SEQ ID NO: 29, or a polypeptide sequence which is at least 60%, 62%, 65%, 67%, 70%, 72%, 75%, 77%, 80%, 82%, 85%, 87%, 90%, 92%, 95%, 97%, 98%, 99% identical to SEQ ID NO: 31.

[0298] In some embodiments, the heavy chain variable domain comprises a polypeptide sequence which is at least 60%, 62%, 65%, 67%, 70%, 72%, 75%, 77%, 80%, 82%, 85%, 87%, 90%, 92%, 95%, 97%, 98%, 99% identical to SEQ ID NO: 33, a polypeptide sequence which is at least 60%, 62%, 65%, 67%, 70%, 72%, 75%, 77%, 80%, 82%, 85%, 87%, 90%, 92%, 95%, 97%, 98%, 99% identical to SEQ ID NO: 37, a polypeptide sequence which is at least 60%, 62%, 65%, 67%, 70%, 72%, 75%, 77%, 80%, 82%, 85%, 87%, 90%, 92%, 95%, 97%, 98%, 99% identical to SEQ ID NO: 39, a polypeptide sequence which is at least 60%, 62%, 65%, 67%, 70%, 72%, 75%, 77%, 80%, 82%, 85%, 87%, 90%, 92%, 95%, 97%, 98%, 99% identical to SEQ ID NO: 43, or a polypeptide sequence which is at least 60%, 62%, 65%, 67%, 70%, 72%, 75%, 77%, 80%, 82%, 85%, 87%, 90%, 92%, 95%, 97%, 98%, 99% identical to SEQ ID NO: 45.

[0299] In some embodiments, the light chain variable domain comprises a polypeptide sequence which is at least 60%, 62%, 65%, 67%, 70%, 72%, 75%, 77%, 80%, 82%, 85%, 87%, 90%, 92%, 95%, 97%, 98%, 99% identical to SEQ ID NO: 4, a polypeptide sequence which is at least 60%, 62%, 65%, 67%, 70%, 72%, 75%, 77%, 80%, 82%, 85%, 87%, 90%, 92%, 95%, 97%, 98%, 99% identical to SEQ ID NO: 8, a polypeptide sequence which is at least 60%, 62%, 65%, 67%, 70%, 72%, 75%, 77%, 80%, 82%, 85%, 87%, 90%, 92%, 95%, 97%, 98%, 99% identical to SEQ ID NO: 10, a polypeptide sequence which is at least 60%, 62%, 65%, 67%, 70%, 72%, 75%, 77%, 80%, 82%, 85%, 87%, 90%, 92%, 95%, 97%, 98%, 99% identical to SEQ ID NO: 12, a polypeptide sequence which is at least 60%, 62%, 65%, 67%, 70%, 72%, 75%, 77%, 80%, 82%, 85%, 87%, 90%, 92%, 95%, 97%, 98%, 99% identical to SEQ ID NO: 18.

[0300] In some embodiments, the light chain variable domain comprises a polypeptide sequence which is at least 60%, 62%, 65%, 67%, 70%, 72%, 75%, 77%, 80%, 82%, 85%, 87%, 90%, 92%, 95%, 97%, 98%, 99% identical to SEQ ID NO: 20, a polypeptide sequence which is at least 60%, 62%, 65%, 67%, 70%, 72%, 75%, 77%, 80%, 82%, 85%, 87%, 90%, 92%, 95%, 97%, 98%, 99% identical to SEQ ID NO: 22, a polypeptide sequence which is at least 60%, 62%, 65%, 67%, 70%, 72%, 75%, 77%, 80%, 82%, 85%, 87%, 90%, 92%, 95%, 97%, 98%, 99% identical to SEQ ID NO: 26, a polypeptide sequence which is at least 60%, 62%, 65%, 67%, 70%, 72%, 75%, 77%, 80%, 82%, 85%, 87%, 90%, 92%, 95%, 97%, 98%, 99% identical to SEQ ID NO: 30, a polypeptide sequence which is at least 60%, 62%, 65%, 67%, 70%, 72%, 75%, 77%, 80%, 82%, 85%, 87%, 90%, 92%, 95%, 97%, 98%, 99% identical to SEQ ID NO: 32.

[0301] In some embodiments, the light chain variable domain comprises a polypeptide sequence which is at least 60%, 62%, 65%, 67%, 70%, 72%, 75%, 77%, 80%, 82%, 85%, 87%, 90%, 92%, 95%, 97%, 98%, 99% identical to SEQ ID NO: 34, a polypeptide sequence which is at least 60%, 62%, 65%, 67%, 70%, 72%, 75%, 77%, 80%, 82%, 85%, 87%, 90%, 92%, 95%, 97%, 98%, 99% identical to SEQ ID NO: 38, a polypeptide sequence which is at least 60%, 62%, 65%, 67%, 70%, 72%, 75%, 77%, 80%, 82%, 85%, 87%, 90%, 92%, 95%, 97%, 98%, 99% identical to SEQ ID NO: 40, a polypeptide sequence which is at least 60%, 62%, 65%, 67%, 70%, 72%, 75%, 77%, 80%, 82%, 85%, 87%, 90%, 92%, 95%, 97%, 98%, 99% identical to SEQ ID NO: 44, a polypeptide sequence which is at least 60%, 62%, 65%, 67%, 70%, 72%, 75%, 77%, 80%, 82%, 85%, 87%, 90%, 92%, 95%, 97%, 98%, 99% identical to SEQ ID NO: 46.

[0302] In some embodiments, the heavy chain variable domain comprises a polypeptide sequence which is at least 60%, 62%, 65%, 67%, 70%, 72%, 75%, 77%, 80%, 82%, 85%, 87%, 90%, 92%, 95%, 97%, 98%, 99% identical to SEQ ID NO: 3 and the light chain variable domain comprises a polypeptide sequence which is at least 60%, 62%, 65%, 67%, 70%, 72%, 75%, 77%, 80%, 82%, 85%, 87%, 90%, 92%, 95%, 97%, 98%, 99% identical to SEQ ID NO: 4. In some embodiments, the heavy chain variable domain comprises a polypeptide sequence which is at least 60%, 62%, 65%, 67%, 70%, 72%, 75%, 77%, 80%, 82%, 85%, 87%, 90%, 92%, 95%, 97%, 98%, 99% identical to SEQ ID NO: 7 and the light chain variable domain comprises a polypeptide sequence which is at least 60%, 62%, 65%, 67%, 70%, 72%, 75%, 77%, 80%, 82%, 85%, 87%, 90%, 92%, 95%, 97%, 98%, 99% identical to SEQ ID NO: 8. In some embodiments, the heavy chain variable domain comprises a polypeptide sequence which is at least 60%, 62%, 65%, 67%, 70%, 72%, 75%, 77%, 80%, 82%, 85%, 87%, 90%, 92%, 95%, 97%, 98%, 99% identical to SEQ ID NO: 9 and the light chain variable domain comprises a polypeptide sequence which is at least 60%, 62%, 65%, 67%, 70%, 72%, 75%, 77%, 80%, 82%, 85%, 87%, 90%, 92%, 95%, 97%, 98%, 99% identical to SEQ ID NO: 10. In some embodiments, the heavy chain variable domain comprises a polypeptide sequence which is at least 60%, 62%, 65%, 67%, 70%, 72%, 75%, 77%, 80%, 82%, 85%, 87%, 90%, 92%, 95%, 97%, 98%, 99% identical to SEQ ID NO: 11 and the light chain variable domain comprises a polypeptide sequence which is at least 60%, 62%, 65%, 67%, 70%, 72%, 75%, 77%, 80%, 82%, 85%, 87%, 90%, 92%, 95%, 97%, 98%, 99% identical to SEQ ID NO: 12. In some embodiments, the heavy chain variable domain comprises a polypeptide sequence which is at least 60%, 62%, 65%, 67%, 70%, 72%, 75%, 77%, 80%, 82%, 85%, 87%, 90%, 92%, 95%, 97%, 98%, 99% identical to SEQ ID NO: 17 and the light chain variable domain comprises a polypeptide sequence which is at least 60%, 62%, 65%, 67%, 70%, 72%, 75%, 77%, 80%, 82%, 85%, 87%, 90%, 92%, 95%, 97%, 98%, 99% identical to SEQ ID NO: 18. In some embodiments, the heavy chain variable domain comprises a polypeptide sequence which is at least 60%, 62%, 65%, 67%, 70%, 72%, 75%, 77%, 80%, 82%, 85%, 87%, 90%, 92%, 95%, 97%, 98%, 99% identical to SEQ ID NO: 19 and the light chain variable domain comprises a polypeptide sequence which is at least 60%, 62%, 65%, 67%, 70%, 72%, 75%, 77%, 80%, 82%, 85%, 87%, 90%, 92%, 95%, 97%, 98%, 99% identical to SEQ ID NO: 20. In some embodiments, the heavy chain variable domain comprises a polypeptide sequence which is at least 60%, 62%, 65%, 67%, 70%, 72%, 75%, 77%, 80%, 82%, 85%, 87%, 90%, 92%, 95%, 97%, 98%, 99% identical to SEQ ID NO: 21 and the light chain variable domain comprises a polypeptide sequence which is at least 60%, 62%, 65%, 67%, 70%, 72%, 75%, 77%, 80%, 82%, 85%, 87%, 90%, 92%, 95%, 97%, 98%, 99% identical to SEQ ID NO: 22. In some embodiments, the heavy chain variable domain comprises a polypeptide sequence which is at least 60%, 62%, 65%, 67%, 70%, 72%, 75%, 77%, 80%, 82%, 85%, 87%, 90%, 92%, 95%, 97%, 98%, 99% identical to SEQ ID NO: 25 and the light chain variable domain comprises a polypeptide sequence which is at least 60%, 62%, 65%, 67%, 70%, 72%, 75%, 77%, 80%, 82%, 85%, 87%, 90%, 92%, 95%, 97%, 98%, 99% identical to SEQ ID NO: 26. In some embodiments, the heavy chain variable domain comprises a polypeptide sequence which is at least 60%, 62%, 65%, 67%, 70%, 72%, 75%, 77%, 80%, 82%, 85%, 87%, 90%, 92%, 95%, 97%, 98%, 99% identical to SEQ ID NO: 29 and the light chain variable domain comprises a polypeptide sequence which is at least 60%, 62%, 65%, 67%, 70%, 72%, 75%, 77%, 80%, 82%, 85%, 87%, 90%, 92%, 95%, 97%, 98%, 99% identical to SEQ ID NO: 30.

[0303] In some embodiments, the heavy chain variable domain comprises a polypeptide sequence which is at least 60%, 62%, 65%, 67%, 70%, 72%, 75%, 77%, 80%, 82%, 85%, 87%, 90%, 92%, 95%, 97%, 98%, 99% identical to SEQ ID NO: 31 and the light chain variable domain comprises a polypeptide sequence which is at least 60%, 62%, 65%, 67%, 70%, 72%, 75%, 77%, 80%, 82%, 85%, 87%, 90%, 92%, 95%, 97%, 98%, 99% identical to SEQ ID NO: 32. In some embodiments, the heavy chain variable domain comprises a polypeptide sequence which is at least 60%, 62%, 65%, 67%, 70%, 72%, 75%, 77%, 80%, 82%, 85%, 87%, 90%, 92%, 95%, 97%, 98%, 99% identical to SEQ ID NO: 33 and the light chain variable domain comprises a polypeptide sequence which is at least 60%, 62%, 65%, 67%, 70%, 72%, 75%, 77%, 80%, 82%, 85%, 87%, 90%, 92%, 95%, 97%, 98%, 99% identical to SEQ ID NO: 34. In some embodiments, the heavy chain variable domain comprises a polypeptide sequence which is at least 60%, 62%, 65%, 67%, 70%, 72%, 75%, 77%, 80%, 82%, 85%, 87%, 90%, 92%, 95%, 97%, 98%, 99% identical to SEQ ID NO: 37 and the light chain variable domain comprises a polypeptide sequence which is at least 60%, 62%, 65%, 67%, 70%, 72%, 75%, 77%, 80%, 82%, 85%, 87%, 90%, 92%, 95%, 97%, 98%, 99% identical to SEQ ID NO: 38. In some embodiments, the heavy chain variable domain comprises a polypeptide sequence which is at least 60%, 62%, 65%, 67%, 70%, 72%, 75%, 77%, 80%, 82%, 85%, 87%, 90%, 92%, 95%, 97%, 98%, 99% identical to SEQ ID NO: 39 and the light chain variable domain comprises a polypeptide sequence which is at least 60%, 62%, 65%, 67%, 70%, 72%, 75%, 77%, 80%, 82%, 85%, 87%, 90%, 92%, 95%, 97%, 98%, 99% identical to SEQ ID NO: 40. In some embodiments, the heavy chain variable domain comprises a polypeptide sequence which is at least 60%, 62%, 65%, 67%, 70%, 72%, 75%, 77%, 80%, 82%, 85%, 87%, 90%, 92%, 95%, 97%, 98%, 99% identical to SEQ ID NO: 43 and the light chain variable domain comprises a polypeptide sequence which is at least 60%, 62%, 65%, 67%, 70%, 72%, 75%, 77%, 80%, 82%, 85%, 87%, 90%, 92%, 95%, 97%, 98%, 99% identical to SEQ ID NO: 44. In some embodiments, the heavy chain variable domain comprises a polypeptide sequence which is at least 60%, 62%, 65%, 67%, 70%, 72%, 75%, 77%, 80%, 82%, 85%, 87%, 90%, 92%, 95%, 97%, 98%, 99% identical to SEQ ID NO: 45 and the light chain variable domain comprises a polypeptide sequence which is at least 60%, 62%, 65%, 67%, 70%, 72%, 75%, 77%, 80%, 82%, 85%, 87%, 90%, 92%, 95%, 97%, 98%, 99% identical to SEQ ID NO: 46.

[0304] In some embodiments, the heavy chain variable domain comprises SEQ ID NO: 3 and the light chain variable domain comprises SEQ ID NO: 4. In some embodiments, the heavy chain variable domain comprises SEQ ID NO: 7 and the light chain variable domain comprises SEQ ID NO: 8. In some embodiments, the heavy chain variable domain comprises SEQ ID NO: 9 and the light chain variable domain comprises SEQ ID NO: 10. In some embodiments, the heavy chain variable domain comprises SEQ ID NO: 11 and the light chain variable domain comprises SEQ ID NO: 12. In some embodiments, the heavy chain variable domain comprises SEQ ID NO: 17 and the light chain variable domain comprises SEQ ID NO: 18. In some embodiments, the heavy chain variable domain comprises SEQ ID NO: 19 and the light chain variable domain comprises SEQ ID NO: 20. In some embodiments, the heavy chain variable domain comprises SEQ ID NO: 21 and the light chain variable domain comprises SEQ ID NO: 22. In some embodiments, the heavy chain variable domain comprises SEQ ID NO: 25 and the light chain variable domain comprises SEQ ID NO: 26. In some embodiments, the heavy chain variable domain comprises SEQ ID NO: 29 and the light chain variable domain comprises SEQ ID NO: 30. In some embodiments, the heavy chain variable domain comprises SEQ ID NO: 31 and the light chain variable domain comprises SEQ ID NO: 32. In some embodiments, the heavy chain variable domain comprises SEQ ID NO: 33 and the light chain variable domain comprises SEQ ID NO: 34. In some embodiments, the heavy chain variable domain comprises SEQ ID NO: 37 and the light chain variable domain comprises SEQ ID NO: 38. In some embodiments, the heavy chain variable domain comprises SEQ ID NO: 39 and the light chain variable domain comprises SEQ ID NO: 40. In some embodiments, the heavy chain variable domain comprises SEQ ID NO: 43 and the light chain variable domain comprises SEQ ID NO: 44. In some embodiments, the heavy chain variable domain comprises SEQ ID NO: 45 and the light chain variable domain comprises SEQ ID NO: 46.

[0305] In some embodiments, the heavy chain variable domain comprises the CDR1, CDR2, and CDR3 regions of SEQ ID NO: 3; the CDR1, CDR2, and CDR3 regions of SEQ ID NO: 7; the CDR1, CDR2, and CDR3 regions of SEQ ID NO: 9; the CDR1, CDR2, and CDR3 regions of SEQ ID NO: 11; or the CDR1, CDR2, and CDR3 regions of SEQ ID NO: 17. In some embodiments, the heavy chain variable domain comprises the CDR1, CDR2, and CDR3 regions of SEQ ID NO: 19; the CDR1, CDR2, and CDR3 regions of SEQ ID NO: 21; the CDR1, CDR2, and CDR3 regions of SEQ ID NO: 25; the CDR1, CDR2, and CDR3 regions of SEQ ID NO: 29; or the CDR1, CDR2, and CDR3 regions of SEQ ID NO: 31. In some embodiments, the heavy chain variable domain comprises the CDR1, CDR2, and CDR3 regions of SEQ ID NO: 33; the CDR1, CDR2, and CDR3 regions of SEQ ID NO: 37; the CDR1, CDR2, and CDR3 regions of SEQ ID NO: 39; the CDR1, CDR2, and CDR3 regions of SEQ ID NO: 43; or the CDR1, CDR2, and CDR3 regions of SEQ ID NO: 45. In some embodiments, the light chain variable domain comprises the CDR1, CDR2, and CDR3 regions of SEQ ID NO: 4; the CDR1, CDR2, and CDR3 regions of SEQ ID NO: 8; the CDR1, CDR2, and CDR3 regions of SEQ ID NO: 10; the CDR1, CDR2, and CDR3 regions of SEQ ID NO: 12; or the CDR1, CDR2, and CDR3 regions of SEQ ID NO: 18. In some embodiments, the light chain variable domain comprises the CDR1, CDR2, and CDR3 regions of SEQ ID NO: 20; the CDR1, CDR2, and CDR3 regions of SEQ ID NO: 22; the CDR1, CDR2, and CDR3 regions of SEQ ID NO: 26; the CDR1, CDR2, and CDR3 regions of SEQ ID NO: 30; or the CDR1, CDR2, and CDR3 regions of SEQ ID NO: 32. In some embodiments, the light chain variable domain comprises the CDR1, CDR2, and CDR3 regions of SEQ ID NO: 34; the CDR1, CDR2, and CDR3 regions of SEQ ID NO: 38; the CDR1, CDR2, and CDR3 regions of SEQ ID NO: 40; the CDR1, CDR2, and CDR3 regions of SEQ ID NO: 44; or the CDR1, CDR2, and CDR3 regions of SEQ ID NO: 46.

[0306] In some embodiments, the antibody neutralizes a coronavirus. In some embodiments, the coronavirus is a SARS-CoV-2 virus. In some embodiments, the coronavirus is a SARS-CoV-2 variant strain. In some embodiments, the variant strain is selected from the group consisting of WA1, B.1.1.7, B1.526, B1.351, P1, B1.352, and B.1.427.

[0307] In some embodiments, the antibody specifically binds an epitope on the surface of the coronavirus. In some embodiments, the epitope comprises at least a portion of a coronavirus spike protein. In some embodiments, the at least a portion of a coronavirus spike protein comprises a receptor binding domain (RBD) of a spike protein. In some embodiments, the at least a portion of a coronavirus spike protein comprises a N-Terminal domain (NTD) of a spike protein. In some embodiments, the coronavirus is a SARS-CoV-2 coronavirus.

[0308] In certain aspects, the invention provides a method of treating or preventing a COVID-19 infection in a subject in need thereof, the method comprising administering to the subject a therapeutically effective amount of a synthesized monoclonal antibody, or a functional fragment thereof, comprising a heavy chain having a variable domain and a constant domain and a light chain having a variable domain and a constant domain, wherein the antibody binds an antigen on a coronavirus particle.

[0309] In some embodiments, the heavy chain variable domain comprises a polypeptide sequence which is at least 60%, 62%, 65%, 67%, 70%, 72%, 75%, 77%, 80%, 82%, 85%, 87%, 90%, 92%, 95%, 97%, 98%, 99% identical to SEQ ID NO: 3, a polypeptide sequence which is at least 60%, 62%, 65%, 67%, 70%, 72%, 75%, 77%, 80%, 82%, 85%, 87%, 90%, 92%, 95%, 97%, 98%, 99% identical to SEQ ID NO: 7, a polypeptide sequence which is at least 60%, 62%, 65%, 67%, 70%, 72%, 75%, 77%, 80%, 82%, 85%, 87%, 90%, 92%, 95%, 97%, 98%, 99% identical to SEQ ID NO: 9, a polypeptide sequence which is at least 60%, 62%, 65%, 67%, 70%, 72%, 75%, 77%, 80%, 82%, 85%, 87%, 90%, 92%, 95%, 97%, 98%, 99% identical to SEQ ID NO: 11, or a polypeptide sequence which is at least 60%, 62%, 65%, 67%, 70%, 72%, 75%, 77%, 80%, 82%, 85%, 87%, 90%, 92%, 95%, 97%, 98%, 99% identical to SEQ ID NO: 17.

[0310] In some embodiments, the heavy chain variable domain comprises a polypeptide sequence which is at least 60%, 62%, 65%, 67%, 70%, 72%, 75%, 77%, 80%, 82%, 85%, 87%, 90%, 92%, 95%, 97%, 98%, 99% identical to SEQ ID NO: 19, a polypeptide sequence which is at least 60%, 62%, 65%, 67%, 70%, 72%, 75%, 77%, 80%, 82%, 85%, 87%, 90%, 92%, 95%, 97%, 98%, 99% identical to SEQ ID NO: 21, a polypeptide sequence which is at least 60%, 62%, 65%, 67%, 70%, 72%, 75%, 77%, 80%, 82%, 85%, 87%, 90%, 92%, 95%, 97%, 98%, 99% identical to SEQ ID NO: 25, a polypeptide sequence which is at least 60%, 62%, 65%, 67%, 70%, 72%, 75%, 77%, 80%, 82%, 85%, 87%, 90%, 92%, 95%, 97%, 98%, 99% identical to SEQ ID NO: 29, or a polypeptide sequence which is at least 60%, 62%, 65%, 67%, 70%, 72%, 75%, 77%, 80%, 82%, 85%, 87%, 90%, 92%, 95%, 97%, 98%, 99% identical to SEQ ID NO: 31.

[0311] In some embodiments, the heavy chain variable domain comprises a polypeptide sequence which is at least 60%, 62%, 65%, 67%, 70%, 72%, 75%, 77%, 80%, 82%, 85%, 87%, 90%, 92%, 95%, 97%, 98%, 99% identical to SEQ ID NO: 33, a polypeptide sequence which is at least 60%, 62%, 65%, 67%, 70%, 72%, 75%, 77%, 80%, 82%, 85%, 87%, 90%, 92%, 95%, 97%, 98%, 99% identical to SEQ ID NO: 37, a polypeptide sequence which is at least 60%, 62%, 65%, 67%, 70%, 72%, 75%, 77%, 80%, 82%, 85%, 87%, 90%, 92%, 95%, 97%, 98%, 99% identical to SEQ ID NO: 39, a polypeptide sequence which is at least 60%, 62%, 65%, 67%, 70%, 72%, 75%, 77%, 80%, 82%, 85%, 87%, 90%, 92%, 95%, 97%, 98%, 99% identical to SEQ ID NO: 43, or a polypeptide sequence which is at least 60%, 62%, 65%, 67%, 70%, 72%, 75%, 77%, 80%, 82%, 85%, 87%, 90%, 92%, 95%, 97%, 98%, 99% identical to SEQ ID NO: 45.

[0312] In some embodiments, the light chain variable domain comprises a polypeptide sequence which is at least 60%, 62%, 65%, 67%, 70%, 72%, 75%, 77%, 80%, 82%, 85%, 87%, 90%, 92%, 95%, 97%, 98%, 99% identical to SEQ ID NO: 4, a polypeptide sequence which is at least 60%, 62%, 65%, 67%, 70%, 72%, 75%, 77%, 80%, 82%, 85%, 87%, 90%, 92%, 95%, 97%, 98%, 99% identical to SEQ ID NO: 8, a polypeptide sequence which is at least 60%, 62%, 65%, 67%, 70%, 72%, 75%, 77%, 80%, 82%, 85%, 87%, 90%, 92%, 95%, 97%, 98%, 99% identical to SEQ ID NO: 10, a polypeptide sequence which is at least 60%, 62%, 65%, 67%, 70%, 72%, 75%, 77%, 80%, 82%, 85%, 87%, 90%, 92%, 95%, 97%, 98%, 99% identical to SEQ ID NO: 12, a polypeptide sequence which is at least 60%, 62%, 65%, 67%, 70%, 72%, 75%, 77%, 80%, 82%, 85%, 87%, 90%, 92%, 95%, 97%, 98%, 99% identical to SEQ ID NO: 18.

[0313] In some embodiments, the light chain variable domain comprises a polypeptide sequence which is at least 60%, 62%, 65%, 67%, 70%, 72%, 75%, 77%, 80%, 82%, 85%, 87%, 90%, 92%, 95%, 97%, 98%, 99% identical to SEQ ID NO: 20, a polypeptide sequence which is at least 60%, 62%, 65%, 67%, 70%, 72%, 75%, 77%, 80%, 82%, 85%, 87%, 90%, 92%, 95%, 97%, 98%, 99% identical to SEQ ID NO: 22, a polypeptide sequence which is at least 60%, 62%, 65%, 67%, 70%, 72%, 75%, 77%, 80%, 82%, 85%, 87%, 90%, 92%, 95%, 97%, 98%, 99% identical to SEQ ID NO: 26, a polypeptide sequence which is at least 60%, 62%, 65%, 67%, 70%, 72%, 75%, 77%, 80%, 82%, 85%, 87%, 90%, 92%, 95%, 97%, 98%, 99% identical to SEQ ID NO: 30, a polypeptide sequence which is at least 60%, 62%, 65%, 67%, 70%, 72%, 75%, 77%, 80%, 82%, 85%, 87%, 90%, 92%, 95%, 97%, 98%, 99% identical to SEQ ID NO: 32.

[0314] In some embodiments, the light chain variable domain comprises a polypeptide sequence which is at least 60%, 62%, 65%, 67%, 70%, 72%, 75%, 77%, 80%, 82%, 85%, 87%, 90%, 92%, 95%, 97%, 98%, 99% identical to SEQ ID NO: 34, a polypeptide sequence which is at least 60%, 62%, 65%, 67%, 70%, 72%, 75%, 77%, 80%, 82%, 85%, 87%, 90%, 92%, 95%, 97%, 98%, 99% identical to SEQ ID NO: 38, a polypeptide sequence which is at least 60%, 62%, 65%, 67%, 70%, 72%, 75%, 77%, 80%, 82%, 85%, 87%, 90%, 92%, 95%, 97%, 98%, 99% identical to SEQ ID NO: 40, a polypeptide sequence which is at least 60%, 62%, 65%, 67%, 70%, 72%, 75%, 77%, 80%, 82%, 85%, 87%, 90%, 92%, 95%, 97%, 98%, 99% identical to SEQ ID NO: 44, a polypeptide sequence which is at least 60%, 62%, 65%, 67%, 70%, 72%, 75%, 77%, 80%, 82%, 85%, 87%, 90%, 92%, 95%, 97%, 98%, 99% identical to SEQ ID NO: 46.

[0315] In some embodiments, the heavy chain variable domain comprises a polypeptide sequence which is at least 60%, 62%, 65%, 67%, 70%, 72%, 75%, 77%, 80%, 82%, 85%, 87%, 90%, 92%, 95%, 97%, 98%, 99% identical to SEQ ID NO: 3 and the light chain variable domain comprises a polypeptide sequence which is at least 60%, 62%, 65%, 67%, 70%, 72%, 75%, 77%, 80%, 82%, 85%, 87%, 90%, 92%, 95%, 97%, 98%, 99% identical to SEQ ID NO: 4. In some embodiments, the heavy chain variable domain comprises a polypeptide sequence which is at least 60%, 62%, 65%, 67%, 70%, 72%, 75%, 77%, 80%, 82%, 85%, 87%, 90%, 92%, 95%, 97%, 98%, 99% identical to SEQ ID NO: 7 and the light chain variable domain comprises a polypeptide sequence which is at least 60%, 62%, 65%, 67%, 70%, 72%, 75%, 77%, 80%, 82%, 85%, 87%, 90%, 92%, 95%, 97%, 98%, 99% identical to SEQ ID NO: 8. In some embodiments, the heavy chain variable domain comprises a polypeptide sequence which is at least 60%, 62%, 65%, 67%, 70%, 72%, 75%, 77%, 80%, 82%, 85%, 87%, 90%, 92%, 95%, 97%, 98%, 99% identical to SEQ ID NO: 9 and the light chain variable domain comprises a polypeptide sequence which is at least 60%, 62%, 65%, 67%, 70%, 72%, 75%, 77%, 80%, 82%, 85%, 87%, 90%, 92%, 95%, 97%, 98%, 99% identical to SEQ ID NO: 10. In some embodiments, the heavy chain variable domain comprises a polypeptide sequence which is at least 60%, 62%, 65%, 67%, 70%, 72%, 75%, 77%, 80%, 82%, 85%, 87%, 90%, 92%, 95%, 97%, 98%, 99% identical to SEQ ID NO: 11 and the light chain variable domain comprises a polypeptide sequence which is at least 60%, 62%, 65%, 67%, 70%, 72%, 75%, 77%, 80%, 82%, 85%, 87%, 90%, 92%, 95%, 97%, 98%, 99% identical to SEQ ID NO: 12. In some embodiments, the heavy chain variable domain comprises a polypeptide sequence which is at least 60%, 62%, 65%, 67%, 70%, 72%, 75%, 77%, 80%, 82%, 85%, 87%, 90%, 92%, 95%, 97%, 98%, 99% identical to SEQ ID NO: 17 and the light chain variable domain comprises a polypeptide sequence which is at least 60%, 62%, 65%, 67%, 70%, 72%, 75%, 77%, 80%, 82%, 85%, 87%, 90%, 92%, 95%, 97%, 98%, 99% identical to SEQ ID NO: 18. In some embodiments, the heavy chain variable domain comprises a polypeptide sequence which is at least 60%, 62%, 65%, 67%, 70%, 72%, 75%, 77%, 80%, 82%, 85%, 87%, 90%, 92%, 95%, 97%, 98%, 99% identical to SEQ ID NO: 19 and the light chain variable domain comprises a polypeptide sequence which is at least 60%, 62%, 65%, 67%, 70%, 72%, 75%, 77%, 80%, 82%, 85%, 87%, 90%, 92%, 95%, 97%, 98%, 99% identical to SEQ ID NO: 20.

[0316] In some embodiments, the heavy chain variable domain comprises a polypeptide sequence which is at least 60%, 62%, 65%, 67%, 70%, 72%, 75%, 77%, 80%, 82%, 85%, 87%, 90%, 92%, 95%, 97%, 98%, 99% identical to SEQ ID NO: 21 and the light chain variable domain comprises a polypeptide sequence which is at least 60%, 62%, 65%, 67%, 70%, 72%, 75%, 77%, 80%, 82%, 85%, 87%, 90%, 92%, 95%, 97%, 98%, 99% identical to SEQ ID NO: 22. In some embodiments, the heavy chain variable domain comprises a polypeptide sequence which is at least 60%, 62%, 65%, 67%, 70%, 72%, 75%, 77%, 80%, 82%, 85%, 87%, 90%, 92%, 95%, 97%, 98%, 99% identical to SEQ ID NO: 25 and the light chain variable domain comprises a polypeptide sequence which is at least 60%, 62%, 65%, 67%, 70%, 72%, 75%, 77%, 80%, 82%, 85%, 87%, 90%, 92%, 95%, 97%, 98%, 99% identical to SEQ ID NO: 26. In some embodiments, the heavy chain variable domain comprises a polypeptide sequence which is at least 60%, 62%, 65%, 67%, 70%, 72%, 75%, 77%, 80%, 82%, 85%, 87%, 90%, 92%, 95%, 97%, 98%, 99% identical to SEQ ID NO: 29 and the light chain variable domain comprises a polypeptide sequence which is at least 60%, 62%, 65%, 67%, 70%, 72%, 75%, 77%, 80%, 82%, 85%, 87%, 90%, 92%, 95%, 97%, 98%, 99% identical to SEQ ID NO: 30. In some embodiments, the heavy chain variable domain comprises a polypeptide sequence which is at least 60%, 62%, 65%, 67%, 70%, 72%, 75%, 77%, 80%, 82%, 85%, 87%, 90%, 92%, 95%, 97%, 98%, 99% identical to SEQ ID NO: 31 and the light chain variable domain comprises a polypeptide sequence which is at least 60%, 62%, 65%, 67%, 70%, 72%, 75%, 77%, 80%, 82%, 85%, 87%, 90%, 92%, 95%, 97%, 98%, 99% identical to SEQ ID NO: 32. In some embodiments, the heavy chain variable domain comprises a polypeptide sequence which is at least 60%, 62%, 65%, 67%, 70%, 72%, 75%, 77%, 80%, 82%, 85%, 87%, 90%, 92%, 95%, 97%, 98%, 99% identical to SEQ ID NO: 33 and the light chain variable domain comprises a polypeptide sequence which is at least 60%, 62%, 65%, 67%, 70%, 72%, 75%, 77%, 80%, 82%, 85%, 87%, 90%, 92%, 95%, 97%, 98%, 99% identical to SEQ ID NO: 34. In some embodiments, the heavy chain variable domain comprises a polypeptide sequence which is at least 60%, 62%, 65%, 67%, 70%, 72%, 75%, 77%, 80%, 82%, 85%, 87%, 90%, 92%, 95%, 97%, 98%, 99% identical to SEQ ID NO: 37 and the light chain variable domain comprises a polypeptide sequence which is at least 60%, 62%, 65%, 67%, 70%, 72%, 75%, 77%, 80%, 82%, 85%, 87%, 90%, 92%, 95%, 97%, 98%, 99% identical to SEQ ID NO: 38.

[0317] In some embodiments, the heavy chain variable domain comprises a polypeptide sequence which is at least 60%, 62%, 65%, 67%, 70%, 72%, 75%, 77%, 80%, 82%, 85%, 87%, 90%, 92%, 95%, 97%, 98%, 99% identical to SEQ ID NO: 39 and the light chain variable domain comprises a polypeptide sequence which is at least 60%, 62%, 65%, 67%, 70%, 72%, 75%, 77%, 80%, 82%, 85%, 87%, 90%, 92%, 95%, 97%, 98%, 99% identical to SEQ ID NO: 40. In some embodiments, the heavy chain variable domain comprises a polypeptide sequence which is at least 60%, 62%, 65%, 67%, 70%, 72%, 75%, 77%, 80%, 82%, 85%, 87%, 90%, 92%, 95%, 97%, 98%, 99% identical to SEQ ID NO: 43 and the light chain variable domain comprises a polypeptide sequence which is at least 60%, 62%, 65%, 67%, 70%, 72%, 75%, 77%, 80%, 82%, 85%, 87%, 90%, 92%, 95%, 97%, 98%, 99% identical to SEQ ID NO: 44. In some embodiments, the heavy chain variable domain comprises a polypeptide sequence which is at least 60%, 62%, 65%, 67%, 70%, 72%, 75%, 77%, 80%, 82%, 85%, 87%, 90%, 92%, 95%, 97%, 98%, 99% identical to SEQ ID NO: 45 and the light chain variable domain comprises a polypeptide sequence which is at least 60%, 62%, 65%, 67%, 70%, 72%, 75%, 77%, 80%, 82%, 85%, 87%, 90%, 92%, 95%, 97%, 98%, 99% identical to SEQ ID NO: 46.

[0318] In some embodiments, the heavy chain variable domain comprises SEQ ID NO: 3 and the light chain variable domain comprises SEQ ID NO: 4. In some embodiments, the heavy chain variable domain comprises SEQ ID NO: 7 and the light chain variable domain comprises SEQ ID NO: 8. In some embodiments, the heavy chain variable domain comprises SEQ ID NO: 9 and the light chain variable domain comprises SEQ ID NO: 10. In some embodiments, the heavy chain variable domain comprises SEQ ID NO: 11 and the light chain variable domain comprises SEQ ID NO: 12. In some embodiments, the heavy chain variable domain comprises SEQ ID NO: 17 and the light chain variable domain comprises SEQ ID NO: 18. In some embodiments, the heavy chain variable domain comprises SEQ ID NO: 19 and the light chain variable domain comprises SEQ ID NO: 20. In some embodiments, the heavy chain variable domain comprises SEQ ID NO: 21 and the light chain variable domain comprises SEQ ID NO: 22. In some embodiments, the heavy chain variable domain comprises SEQ ID NO: 25 and the light chain variable domain comprises SEQ ID NO: 26. In some embodiments, the heavy chain variable domain comprises SEQ ID NO: 29 and the light chain variable domain comprises SEQ ID NO: 30. In some embodiments, the heavy chain variable domain comprises SEQ ID NO: 31 and the light chain variable domain comprises SEQ ID NO: 32. In some embodiments, the heavy chain variable domain comprises SEQ ID NO: 33 and the light chain variable domain comprises SEQ ID NO: 34. In some embodiments, the heavy chain variable domain comprises SEQ ID NO: 37 and the light chain variable domain comprises SEQ ID NO: 38. In some embodiments, the heavy chain variable domain comprises SEQ ID NO: 39 and the light chain variable domain comprises SEQ ID NO: 40. In some embodiments, the heavy chain variable domain comprises SEQ ID NO: 43 and the light chain variable domain comprises SEQ ID NO: 44. In some embodiments, the heavy chain variable domain comprises SEQ ID NO: 45 and the light chain variable domain comprises SEQ ID NO: 46.

[0319] In some embodiments, the heavy chain variable domain comprises the CDR1, CDR2, and CDR3 regions of SEQ ID NO: 3; the CDR1, CDR2, and CDR3 regions of SEQ ID NO: 7; the CDR1, CDR2, and CDR3 regions of SEQ ID NO: 9; the CDR1, CDR2, and CDR3 regions of SEQ ID NO: 11; or the CDR1, CDR2, and CDR3 regions of SEQ ID NO: 17. In some embodiments, the heavy chain variable domain comprises the CDR1, CDR2, and CDR3 regions of SEQ ID NO: 19; the CDR1, CDR2, and CDR3 regions of SEQ ID NO: 21; the CDR1, CDR2, and CDR3 regions of SEQ ID NO: 25; the CDR1, CDR2, and CDR3 regions of SEQ ID NO: 29; or the CDR1, CDR2, and CDR3 regions of SEQ ID NO: 31. In some embodiments, the heavy chain variable domain comprises the CDR1, CDR2, and CDR3 regions of SEQ ID NO: 33; the CDR1, CDR2, and CDR3 regions of SEQ ID NO: 37; the CDR1, CDR2, and CDR3 regions of SEQ ID NO: 39; the CDR1, CDR2, and CDR3 regions of SEQ ID NO: 43; or the CDR1, CDR2, and CDR3 regions of SEQ ID NO: 45. In some embodiments, the light chain variable domain comprises the CDR1, CDR2, and CDR3 regions of SEQ ID NO: 4; the CDR1, CDR2, and CDR3 regions of SEQ ID NO: 8; the CDR1, CDR2, and CDR3 regions of SEQ ID NO: 10; the CDR1, CDR2, and CDR3 regions of SEQ ID NO: 12; or the CDR1, CDR2, and CDR3 regions of SEQ ID NO: 18. In some embodiments, the light chain variable domain comprises the CDR1, CDR2, and CDR3 regions of SEQ ID NO: 20; the CDR1, CDR2, and CDR3 regions of SEQ ID NO: 22; the CDR1, CDR2, and CDR3 regions of SEQ ID NO: 26; the CDR1, CDR2, and CDR3 regions of SEQ ID NO: 30; or the CDR1, CDR2, and CDR3 regions of SEQ ID NO: 32. In some embodiments, the light chain variable domain comprises the CDR1, CDR2, and CDR3 regions of SEQ ID NO: 34; the CDR1, CDR2, and CDR3 regions of SEQ ID NO: 38; the CDR1, CDR2, and CDR3 regions of SEQ ID NO: 40; the CDR1, CDR2, and CDR3 regions of SEQ ID NO: 44; or the CDR1, CDR2, and CDR3 regions of SEQ ID NO: 46.

[0320] In some embodiments, the antibody neutralizes a coronavirus. In some embodiments, the coronavirus is a SARS-CoV-2 virus. In some embodiments, the coronavirus is a SARS-CoV-2 variant strain. In some embodiments, the variant strain is selected from the group consisting of WA1, B.1.1.7, B1.526, B1.351, P1, B1.352, and B.1.427.

[0321] In some embodiments, the antibody specifically binds an epitope on the surface of the coronavirus. In some embodiments, the epitope comprises at least a portion of a coronavirus spike protein. In some embodiments, the at least a portion of a coronavirus spike protein comprises a receptor binding domain (RBD) of a spike protein. In some embodiments, the at least a portion of a coronavirus spike protein comprises a N-Terminal domain (NTD) of a spike protein. In some embodiments, the coronavirus is a SARS-CoV-2 coronavirus. In some embodiments, the composition is administered in combination with a second therapeutic agent.

[0322] In certain aspects, the invention provides a bispecific molecule comprising a first polypeptide chain and a second polypeptide chain, wherein: the first polypeptide chain comprises: a first light chain comprising a variable domain and a constant domain; a first heavy chain comprising a variable domain and a constant domain; the second polypeptide chain comprises: a second light chain comprising a variable domain and a constant domain; and a second heavy chain comprising a variable domain and a constant domain.

[0323] In some embodiments, the first polypeptide chain and the second polypeptide chain are covalently bonded to one another. In some embodiments, the first heavy chain comprises a polypeptide sequence which is at least 60%, 62%, 65%, 67%, 70%, 72%, 75%, 77%, 80%, 82%, 85%, 87%, 90%, 92%, 95%, 97%, 98%, 99% identical to SEQ ID NO: 51, a polypeptide sequence which is at least 60%, 62%, 65%, 67%, 70%, 72%, 75%, 77%, 80%, 82%, 85%, 87%, 90%, 92%, 95%, 97%, 98%, 99% identical to SEQ ID NO: 55, a polypeptide sequence which is at least 60%, 62%, 65%, 67%, 70%, 72%, 75%, 77%, 80%, 82%, 85%, 87%, 90%, 92%, 95%, 97%, 98%, 99% identical to SEQ ID NO: 67, a polypeptide sequence which is at least 60%, 62%, 65%, 67%, 70%, 72%, 75%, 77%, 80%, 82%, 85%, 87%, 90%, 92%, 95%, 97%, 98%, 99% identical to SEQ ID NO: 71, a polypeptide sequence which is at least 60%, 62%, 65%, 67%, 70%, 72%, 75%, 77%, 80%, 82%, 85%, 87%, 90%, 92%, 95%, 97%, 98%, 99% identical to SEQ ID NO: 75, a polypeptide sequence which is at least 60%, 62%, 65%, 67%, 70%, 72%, 75%, 77%, 80%, 82%, 85%, 87%, 90%, 92%, 95%, 97%, 98%, 99% identical to SEQ ID NO: 79, a polypeptide sequence which is at least 60%, 62%, 65%, 67%, 70%, 72%, 75%, 77%, 80%, 82%, 85%, 87%, 90%, 92%, 95%, 97%, 98%, 99% identical to SEQ ID NO: 83, a polypeptide sequence which is at least 60%, 62%, 65%, 67%, 70%, 72%, 75%, 77%, 80%, 82%, 85%, 87%, 90%, 92%, 95%, 97%, 98%, 99% identical to SEQ ID NO: 87, a polypeptide sequence which is at least 60%, 62%, 65%, 67%, 70%, 72%, 75%, 77%, 80%, 82%, 85%, 87%, 90%, 92%, 95%, 97%, 98%, 99% identical to SEQ ID NO: 91, a polypeptide sequence which is at least 60%, 62%, 65%, 67%, 70%, 72%, 75%, 77%, 80%, 82%, 85%, 87%, 90%, 92%, 95%, 97%, 98%, 99% identical to SEQ ID NO: 95, a polypeptide sequence which is at least 60%, 62%, 65%, 67%, 70%, 72%, 75%, 77%, 80%, 82%, 85%, 87%, 90%, 92%, 95%, 97%, 98%, 99% identical to SEQ ID NO: 99, a polypeptide sequence which is at least 60%, 62%, 65%, 67%, 70%, 72%, 75%, 77%, 80%, 82%, 85%, 87%, 90%, 92%, 95%, 97%, 98%, 99% identical to SEQ ID NO: 103, a polypeptide sequence which is at least 60%, 62%, 65%, 67%, 70%, 72%, 75%, 77%, 80%, 82%, 85%, 87%, 90%, 92%, 95%, 97%, 98%, 99% identical to SEQ ID NO: 107, a polypeptide sequence which is at least 60%, 62%, 65%, 67%, 70%, 72%, 75%, 77%, 80%, 82%, 85%, 87%, 90%, 92%, 95%, 97%, 98%, 99% identical to SEQ ID NO: 115, a polypeptide sequence which is at least 60%, 62%, 65%, 67%, 70%, 72%, 75%, 77%, 80%, 82%, 85%, 87%, 90%, 92%, 95%, 97%, 98%, 99% identical to SEQ ID NO: 119, a polypeptide sequence which is at least 60%, 62%, 65%, 67%, 70%, 72%, 75%, 77%, 80%, 82%, 85%, 87%, 90%, 92%, 95%, 97%, 98%, 99% identical to SEQ ID NO: 123, a polypeptide sequence which is at least 60%, 62%, 65%, 67%, 70%, 72%, 75%, 77%, 80%, 82%, 85%, 87%, 90%, 92%, 95%, 97%, 98%, 99% identical to SEQ ID NO: 127, a polypeptide sequence which is at least 60%, 62%, 65%, 67%, 70%, 72%, 75%, 77%, 80%, 82%, 85%, 87%, 90%, 92%, 95%, 97%, 98%, 99% identical to SEQ ID NO: 131, a polypeptide sequence which is at least 60%, 62%, 65%, 67%, 70%, 72%, 75%, 77%, 80%, 82%, 85%, 87%, 90%, 92%, 95%, 97%, 98%, 99% identical to SEQ ID NO: 139, a polypeptide sequence which is at least 60%, 62%, 65%, 67%, 70%, 72%, 75%, 77%, 80%, 82%, 85%, 87%, 90%, 92%, 95%, 97%, 98%, 99% identical to SEQ ID NO: 143, a polypeptide sequence which is at least 60%, 62%, 65%, 67%, 70%, 72%, 75%, 77%, 80%, 82%, 85%, 87%, 90%, 92%, 95%, 97%, 98%, 99% identical to SEQ ID NO: 147, a polypeptide sequence which is at least 60%, 62%, 65%, 67%, 70%, 72%, 75%, 77%, 80%, 82%, 85%, 87%, 90%, 92%, 95%, 97%, 98%, 99% identical to SEQ ID NO: 151, a polypeptide sequence which is at least 60%, 62%, 65%, 67%, 70%, 72%, 75%, 77%, 80%, 82%, 85%, 87%, 90%, 92%, 95%, 97%, 98%, 99% identical to SEQ ID NO: 155, a polypeptide sequence which is at least 60%, 62%, 65%, 67%, 70%, 72%, 75%, 77%, 80%, 82%, 85%, 87%, 90%, 92%, 95%, 97%, 98%, 99% identical to SEQ ID NO: 159, a polypeptide sequence which is at least 60%, 62%, 65%, 67%, 70%, 72%, 75%, 77%, 80%, 82%, 85%, 87%, 90%, 92%, 95%, 97%, 98%, 99% identical to SEQ ID NO: 163, a polypeptide sequence which is at least 60%, 62%, 65%, 67%, 70%, 72%, 75%, 77%, 80%, 82%, 85%, 87%, 90%, 92%, 95%, 97%, 98%, 99% identical to SEQ ID NO: 167, a polypeptide sequence which is at least 60%, 62%, 65%, 67%, 70%, 72%, 75%, 77%, 80%, 82%, 85%, 87%, 90%, 92%, 95%, 97%, 98%, 99% identical to SEQ ID NO: 171, a polypeptide sequence which is at least 60%, 62%, 65%, 67%, 70%, 72%, 75%, 77%, 80%, 82%, 85%, 87%, 90%, 92%, 95%, 97%, 98%, 99% identical to SEQ ID NO: 175, a polypeptide sequence which is at least 60%, 62%, 65%, 67%, 70%, 72%, 75%, 77%, 80%, 82%, 85%, 87%, 90%, 92%, 95%, 97%, 98%, 99% identical to SEQ ID NO: 179, or a polypeptide sequence which is at least 60%, 62%, 65%, 67%, 70%, 72%, 75%, 77%, 80%, 82%, 85%, 87%, 90%, 92%, 95%, 97%, 98%, 99% identical to SEQ ID NO:183.

[0324] In some embodiments, the first light chain comprises a polypeptide sequence which is at least 60%, 62%, 65%, 67%, 70%, 72%, 75%, 77%, 80%, 82%, 85%, 87%, 90%, 92%, 95%, 97%, 98%, 99% identical to SEQ ID NO: 52, a polypeptide sequence which is at least 60%, 62%, 65%, 67%, 70%, 72%, 75%, 77%, 80%, 82%, 85%, 87%, 90%, 92%, 95%, 97%, 98%, 99% identical to SEQ ID NO: 56, a polypeptide sequence which is at least 60%, 62%, 65%, 67%, 70%, 72%, 75%, 77%, 80%, 82%, 85%, 87%, 90%, 92%, 95%, 97%, 98%, 99% identical to SEQ ID NO: 68; a polypeptide sequence which is at least 60%, 62%, 65%, 67%, 70%, 72%, 75%, 77%, 80%, 82%, 85%, 87%, 90%, 92%, 95%, 97%, 98%, 99% identical to SEQ ID NO: 72, a polypeptide sequence which is at least 60%, 62%, 65%, 67%, 70%, 72%, 75%, 77%, 80%, 82%, 85%, 87%, 90%, 92%, 95%, 97%, 98%, 99% identical to SEQ ID NO: 76, a polypeptide sequence which is at least 60%, 62%, 65%, 67%, 70%, 72%, 75%, 77%, 80%, 82%, 85%, 87%, 90%, 92%, 95%, 97%, 98%, 99% identical to SEQ ID NO: 80, a polypeptide sequence which is at least 60%, 62%, 65%, 67%, 70%, 72%, 75%, 77%, 80%, 82%, 85%, 87%, 90%, 92%, 95%, 97%, 98%, 99% identical to SEQ ID NO: 84, a polypeptide sequence which is at least 60%, 62%, 65%, 67%, 70%, 72%, 75%, 77%, 80%, 82%, 85%, 87%, 90%, 92%, 95%, 97%, 98%, 99% identical to SEQ ID NO: 88, a polypeptide sequence which is at least 60%, 62%, 65%, 67%, 70%, 72%, 75%, 77%, 80%, 82%, 85%, 87%, 90%, 92%, 95%, 97%, 98%, 99% identical to SEQ ID NO: 92, a polypeptide sequence which is at least 60%, 62%, 65%, 67%, 70%, 72%, 75%, 77%, 80%, 82%, 85%, 87%, 90%, 92%, 95%, 97%, 98%, 99% identical to SEQ ID NO: 96, a polypeptide sequence which is at least 60%, 62%, 65%, 67%, 70%, 72%, 75%, 77%, 80%, 82%, 85%, 87%, 90%, 92%, 95%, 97%, 98%, 99% identical to SEQ ID NO: 100, a polypeptide sequence which is at least 60%, 62%, 65%, 67%, 70%, 72%, 75%, 77%, 80%, 82%, 85%, 87%, 90%, 92%, 95%, 97%, 98%, 99% identical to SEQ ID NO: 104, a polypeptide sequence which is at least 60%, 62%, 65%, 67%, 70%, 72%, 75%, 77%, 80%, 82%, 85%, 87%, 90%, 92%, 95%, 97%, 98%, 99% identical to SEQ ID NO: 108, a polypeptide sequence which is at least 60%, 62%, 65%, 67%, 70%, 72%, 75%, 77%, 80%, 82%, 85%, 87%, 90%, 92%, 95%, 97%, 98%, 99% identical to SEQ ID NO: 116, a polypeptide sequence which is at least 60%, 62%, 65%, 67%, 70%, 72%, 75%, 77%, 80%, 82%, 85%, 87%, 90%, 92%, 95%, 97%, 98%, 99% identical to SEQ ID NO: 120, a polypeptide sequence which is at least 60%, 62%, 65%, 67%, 70%, 72%, 75%, 77%, 80%, 82%, 85%, 87%, 90%, 92%, 95%, 97%, 98%, 99% identical to SEQ ID NO: 124, a polypeptide sequence which is at least 60%, 62%, 65%, 67%, 70%, 72%, 75%, 77%, 80%, 82%, 85%, 87%, 90%, 92%, 95%, 97%, 98%, 99% identical to SEQ ID NO: 128, a polypeptide sequence which is at least 60%, 62%, 65%, 67%, 70%, 72%, 75%, 77%, 80%, 82%, 85%, 87%, 90%, 92%, 95%, 97%, 98%, 99% identical to SEQ ID NO: 132, a polypeptide sequence which is at least 60%, 62%, 65%, 67%, 70%, 72%, 75%, 77%, 80%, 82%, 85%, 87%, 90%, 92%, 95%, 97%, 98%, 99% identical to SEQ ID NO: 140, a polypeptide sequence which is at least 60%, 62%, 65%, 67%, 70%, 72%, 75%, 77%, 80%, 82%, 85%, 87%, 90%, 92%, 95%, 97%, 98%, 99% identical to SEQ ID NO: 144, a polypeptide sequence which is at least 60%, 62%, 65%, 67%, 70%, 72%, 75%, 77%, 80%, 82%, 85%, 87%, 90%, 92%, 95%, 97%, 98%, 99% identical to SEQ ID NO: 148, a polypeptide sequence which is at least 60%, 62%, 65%, 67%, 70%, 72%, 75%, 77%, 80%, 82%, 85%, 87%, 90%, 92%, 95%, 97%, 98%, 99% identical to SEQ ID NO: 152, a polypeptide sequence which is at least 60%, 62%, 65%, 67%, 70%, 72%, 75%, 77%, 80%, 82%, 85%, 87%, 90%, 92%, 95%, 97%, 98%, 99% identical to SEQ ID NO: 156, a polypeptide sequence which is at least 60%, 62%, 65%, 67%, 70%, 72%, 75%, 77%, 80%, 82%, 85%, 87%, 90%, 92%, 95%, 97%, 98%, 99% identical to SEQ ID NO: 160, a polypeptide sequence which is at least 60%, 62%, 65%, 67%, 70%, 72%, 75%, 77%, 80%, 82%, 85%, 87%, 90%, 92%, 95%, 97%, 98%, 99% identical to SEQ ID NO: 164, a polypeptide sequence which is at least 60%, 62%, 65%, 67%, 70%, 72%, 75%, 77%, 80%, 82%, 85%, 87%, 90%, 92%, 95%, 97%, 98%, 99% identical to SEQ ID NO: 168, a polypeptide sequence which is at least 60%, 62%, 65%, 67%, 70%, 72%, 75%, 77%, 80%, 82%, 85%, 87%, 90%, 92%, 95%, 97%, 98%, 99% identical to SEQ ID NO: 172, a polypeptide sequence which is at least 60%, 62%, 65%, 67%, 70%, 72%, 75%, 77%, 80%, 82%, 85%, 87%, 90%, 92%, 95%, 97%, 98%, 99% identical to SEQ ID NO: 176, a polypeptide sequence which is at least 60%, 62%, 65%, 67%, 70%, 72%, 75%, 77%, 80%, 82%, 85%, 87%, 90%, 92%, 95%, 97%, 98%, 99% identical to SEQ ID NO: 180, or a polypeptide sequence which is at least 60%, 62%, 65%, 67%, 70%, 72%, 75%, 77%, 80%, 82%, 85%, 87%, 90%, 92%, 95%, 97%, 98%, 99% identical to SEQ ID NO:184.

[0325] In some embodiments, the second heavy chain comprises a polypeptide sequence which is at least 60%, 62%, 65%, 67%, 70%, 72%, 75%, 77%, 80%, 82%, 85%, 87%, 90%, 92%, 95%, 97%, 98%, 99% identical to SEQ ID NO: 53, a polypeptide sequence which is at least 60%, 62%, 65%, 67%, 70%, 72%, 75%, 77%, 80%, 82%, 85%, 87%, 90%, 92%, 95%, 97%, 98%, 99% identical to SEQ ID NO: 57, a polypeptide sequence which is at least 60%, 62%, 65%, 67%, 70%, 72%, 75%, 77%, 80%, 82%, 85%, 87%, 90%, 92%, 95%, 97%, 98%, 99% identical to SEQ ID NO: 69, a polypeptide sequence which is at least 60%, 62%, 65%, 67%, 70%, 72%, 75%, 77%, 80%, 82%, 85%, 87%, 90%, 92%, 95%, 97%, 98%, 99% identical to SEQ ID NO: 73, a polypeptide sequence which is at least 60%, 62%, 65%, 67%, 70%, 72%, 75%, 77%, 80%, 82%, 85%, 87%, 90%, 92%, 95%, 97%, 98%, 99% identical to SEQ ID NO: 77, a polypeptide sequence which is at least 60%, 62%, 65%, 67%, 70%, 72%, 75%, 77%, 80%, 82%, 85%, 87%, 90%, 92%, 95%, 97%, 98%, 99% identical to SEQ ID NO: 81, a polypeptide sequence which is at least 60%, 62%, 65%, 67%, 70%, 72%, 75%, 77%, 80%, 82%, 85%, 87%, 90%, 92%, 95%, 97%, 98%, 99% identical to SEQ ID NO: 85, a polypeptide sequence which is at least 60%, 62%, 65%, 67%, 70%, 72%, 75%, 77%, 80%, 82%, 85%, 87%, 90%, 92%, 95%, 97%, 98%, 99% identical to SEQ ID NO: 89, a polypeptide sequence which is at least 60%, 62%, 65%, 67%, 70%, 72%, 75%, 77%, 80%, 82%, 85%, 87%, 90%, 92%, 95%, 97%, 98%, 99% identical to SEQ ID NO: 93, a polypeptide sequence which is at least 60%, 62%, 65%, 67%, 70%, 72%, 75%, 77%, 80%, 82%, 85%, 87%, 90%, 92%, 95%, 97%, 98%, 99% identical to SEQ ID NO: 97, a polypeptide sequence which is at least 60%, 62%, 65%, 67%, 70%, 72%, 75%, 77%, 80%, 82%, 85%, 87%, 90%, 92%, 95%, 97%, 98%, 99% identical to SEQ ID NO: 101, a polypeptide sequence which is at least 60%, 62%, 65%, 67%, 70%, 72%, 75%, 77%, 80%, 82%, 85%, 87%, 90%, 92%, 95%, 97%, 98%, 99% identical to SEQ ID NO: 105, a polypeptide sequence which is at least 60%, 62%, 65%, 67%, 70%, 72%, 75%, 77%, 80%, 82%, 85%, 87%, 90%, 92%, 95%, 97%, 98%, 99% identical to SEQ ID NO: 109, a polypeptide sequence which is at least 60%, 62%, 65%, 67%, 70%, 72%, 75%, 77%, 80%, 82%, 85%, 87%, 90%, 92%, 95%, 97%, 98%, 99% identical to SEQ ID NO: 117, a polypeptide sequence which is at least 60%, 62%, 65%, 67%, 70%, 72%, 75%, 77%, 80%, 82%, 85%, 87%, 90%, 92%, 95%, 97%, 98%, 99% identical to SEQ ID NO: 121, a polypeptide sequence which is at least 60%, 62%, 65%, 67%, 70%, 72%, 75%, 77%, 80%, 82%, 85%, 87%, 90%, 92%, 95%, 97%, 98%, 99% identical to SEQ ID NO: 125, a polypeptide sequence which is at least 60%, 62%, 65%, 67%, 70%, 72%, 75%, 77%, 80%, 82%, 85%, 87%, 90%, 92%, 95%, 97%, 98%, 99% identical to SEQ ID NO: 129, a polypeptide sequence which is at least 60%, 62%, 65%, 67%, 70%, 72%, 75%, 77%, 80%, 82%, 85%, 87%, 90%, 92%, 95%, 97%, 98%, 99% identical to SEQ ID NO: 133, a polypeptide sequence which is at least 60%, 62%, 65%, 67%, 70%, 72%, 75%, 77%, 80%, 82%, 85%, 87%, 90%, 92%, 95%, 97%, 98%, 99% identical to SEQ ID NO: 141, a polypeptide sequence which is at least 60%, 62%, 65%, 67%, 70%, 72%, 75%, 77%, 80%, 82%, 85%, 87%, 90%, 92%, 95%, 97%, 98%, 99% identical to SEQ ID NO: 145, a polypeptide sequence which is at least 60%, 62%, 65%, 67%, 70%, 72%, 75%, 77%, 80%, 82%, 85%, 87%, 90%, 92%, 95%, 97%, 98%, 99% identical to SEQ ID NO: 149, a polypeptide sequence which is at least 60%, 62%, 65%, 67%, 70%, 72%, 75%, 77%, 80%, 82%, 85%, 87%, 90%, 92%, 95%, 97%, 98%, 99% identical to SEQ ID NO: 153, a polypeptide sequence which is at least 60%, 62%, 65%, 67%, 70%, 72%, 75%, 77%, 80%, 82%, 85%, 87%, 90%, 92%, 95%, 97%, 98%, 99% identical to SEQ ID NO: 157, a polypeptide sequence which is at least 60%, 62%, 65%, 67%, 70%, 72%, 75%, 77%, 80%, 82%, 85%, 87%, 90%, 92%, 95%, 97%, 98%, 99% identical to SEQ ID NO: 161, a polypeptide sequence which is at least 60%, 62%, 65%, 67%, 70%, 72%, 75%, 77%, 80%, 82%, 85%, 87%, 90%, 92%, 95%, 97%, 98%, 99% identical to SEQ ID NO: 165, a polypeptide sequence which is at least 60%, 62%, 65%, 67%, 70%, 72%, 75%, 77%, 80%, 82%, 85%, 87%, 90%, 92%, 95%, 97%, 98%, 99% identical to SEQ ID NO: 169, a polypeptide sequence which is at least 60%, 62%, 65%, 67%, 70%, 72%, 75%, 77%, 80%, 82%, 85%, 87%, 90%, 92%, 95%, 97%, 98%, 99% identical to SEQ ID NO: 173, a polypeptide sequence which is at least 60%, 62%, 65%, 67%, 70%, 72%, 75%, 77%, 80%, 82%, 85%, 87%, 90%, 92%, 95%, 97%, 98%, 99% identical to SEQ ID NO: 177, a polypeptide sequence which is at least 60%, 62%, 65%, 67%, 70%, 72%, 75%, 77%, 80%, 82%, 85%, 87%, 90%, 92%, 95%, 97%, 98%, 99% identical to SEQ ID NO: 181, or a polypeptide sequence which is at least 60%, 62%, 65%, 67%, 70%, 72%, 75%, 77%, 80%, 82%, 85%, 87%, 90%, 92%, 95%, 97%, 98%, 99% identical to SEQ ID NO: 185.

[0326] In some embodiments, the second light chain comprises a polypeptide sequence which is at least 60%, 62%, 65%, 67%, 70%, 72%, 75%, 77%, 80%, 82%, 85%, 87%, 90%, 92%, 95%, 97%, 98%, 99% identical to SEQ ID NO: 54, a polypeptide sequence which is at least 60%, 62%, 65%, 67%, 70%, 72%, 75%, 77%, 80%, 82%, 85%, 87%, 90%, 92%, 95%, 97%, 98%, 99% identical to SEQ ID NO: 58, a polypeptide sequence which is at least 60%, 62%, 65%, 67%, 70%, 72%, 75%, 77%, 80%, 82%, 85%, 87%, 90%, 92%, 95%, 97%, 98%, 99% identical to SEQ ID NO: 70, a polypeptide sequence which is at least 60%, 62%, 65%, 67%, 70%, 72%, 75%, 77%, 80%, 82%, 85%, 87%, 90%, 92%, 95%, 97%, 98%, 99% identical to SEQ ID NO: 74, a polypeptide sequence which is at least 60%, 62%, 65%, 67%, 70%, 72%, 75%, 77%, 80%, 82%, 85%, 87%, 90%, 92%, 95%, 97%, 98%, 99% identical to SEQ ID NO: 78, a polypeptide sequence which is at least 60%, 62%, 65%, 67%, 70%, 72%, 75%, 77%, 80%, 82%, 85%, 87%, 90%, 92%, 95%, 97%, 98%, 99% identical to SEQ ID NO: 82, a polypeptide sequence which is at least 60%, 62%, 65%, 67%, 70%, 72%, 75%, 77%, 80%, 82%, 85%, 87%, 90%, 92%, 95%, 97%, 98%, 99% identical to SEQ ID NO: 86, a polypeptide sequence which is at least 60%, 62%, 65%, 67%, 70%, 72%, 75%, 77%, 80%, 82%, 85%, 87%, 90%, 92%, 95%, 97%, 98%, 99% identical to SEQ ID NO: 90, a polypeptide sequence which is at least 60%, 62%, 65%, 67%, 70%, 72%, 75%, 77%, 80%, 82%, 85%, 87%, 90%, 92%, 95%, 97%, 98%, 99% identical to SEQ ID NO: 94, a polypeptide sequence which is at least 60%, 62%, 65%, 67%, 70%, 72%, 75%, 77%, 80%, 82%, 85%, 87%, 90%, 92%, 95%, 97%, 98%, 99% identical to SEQ ID NO: 98, a polypeptide sequence which is at least 60%, 62%, 65%, 67%, 70%, 72%, 75%, 77%, 80%, 82%, 85%, 87%, 90%, 92%, 95%, 97%, 98%, 99% identical to SEQ ID NO: 102, a polypeptide sequence which is at least 60%, 62%, 65%, 67%, 70%, 72%, 75%, 77%, 80%, 82%, 85%, 87%, 90%, 92%, 95%, 97%, 98%, 99% identical to SEQ ID NO: 106, a polypeptide sequence which is at least 60%, 62%, 65%, 67%, 70%, 72%, 75%, 77%, 80%, 82%, 85%, 87%, 90%, 92%, 95%, 97%, 98%, 99% identical to SEQ ID NO: 110, a polypeptide sequence which is at least 60%, 62%, 65%, 67%, 70%, 72%, 75%, 77%, 80%, 82%, 85%, 87%, 90%, 92%, 95%, 97%, 98%, 99% identical to SEQ ID NO: 118, a polypeptide sequence which is at least 60%, 62%, 65%, 67%, 70%, 72%, 75%, 77%, 80%, 82%, 85%, 87%, 90%, 92%, 95%, 97%, 98%, 99% identical to SEQ ID NO: 122, a polypeptide sequence which is at least 60%, 62%, 65%, 67%, 70%, 72%, 75%, 77%, 80%, 82%, 85%, 87%, 90%, 92%, 95%, 97%, 98%, 99% identical to SEQ ID NO: 126, a polypeptide sequence which is at least 60%, 62%, 65%, 67%, 70%, 72%, 75%, 77%, 80%, 82%, 85%, 87%, 90%, 92%, 95%, 97%, 98%, 99% identical to SEQ ID NO: 130, a polypeptide sequence which is at least 60%, 62%, 65%, 67%, 70%, 72%, 75%, 77%, 80%, 82%, 85%, 87%, 90%, 92%, 95%, 97%, 98%, 99% identical to SEQ ID NO: 134, a polypeptide sequence which is at least 60%, 62%, 65%, 67%, 70%, 72%, 75%, 77%, 80%, 82%, 85%, 87%, 90%, 92%, 95%, 97%, 98%, 99% identical to SEQ ID NO: 142, a polypeptide sequence which is at least 60%, 62%, 65%, 67%, 70%, 72%, 75%, 77%, 80%, 82%, 85%, 87%, 90%, 92%, 95%, 97%, 98%, 99% identical to SEQ ID NO: 146, a polypeptide sequence which is at least 60%, 62%, 65%, 67%, 70%, 72%, 75%, 77%, 80%, 82%, 85%, 87%, 90%, 92%, 95%, 97%, 98%, 99% identical to SEQ ID NO: 150, a polypeptide sequence which is at least 60%, 62%, 65%, 67%, 70%, 72%, 75%, 77%, 80%, 82%, 85%, 87%, 90%, 92%, 95%, 97%, 98%, 99% identical to SEQ ID NO: 154, a polypeptide sequence which is at least 60%, 62%, 65%, 67%, 70%, 72%, 75%, 77%, 80%, 82%, 85%, 87%, 90%, 92%, 95%, 97%, 98%, 99% identical to SEQ ID NO: 158, a polypeptide sequence which is at least 60%, 62%, 65%, 67%, 70%, 72%, 75%, 77%, 80%, 82%, 85%, 87%, 90%, 92%, 95%, 97%, 98%, 99% identical to SEQ ID NO: 162, a polypeptide sequence which is at least 60%, 62%, 65%, 67%, 70%, 72%, 75%, 77%, 80%, 82%, 85%, 87%, 90%, 92%, 95%, 97%, 98%, 99% identical to SEQ ID NO: 166, a polypeptide sequence which is at least 60%, 62%, 65%, 67%, 70%, 72%, 75%, 77%, 80%, 82%, 85%, 87%, 90%, 92%, 95%, 97%, 98%, 99% identical to SEQ ID NO: 170, a polypeptide sequence which is at least 60%, 62%, 65%, 67%, 70%, 72%, 75%, 77%, 80%, 82%, 85%, 87%, 90%, 92%, 95%, 97%, 98%, 99% identical to SEQ ID NO: 174, a polypeptide sequence which is at least 60%, 62%, 65%, 67%, 70%, 72%, 75%, 77%, 80%, 82%, 85%, 87%, 90%, 92%, 95%, 97%, 98%, 99% identical to SEQ ID NO: 178, a polypeptide sequence which is at least 60%, 62%, 65%, 67%, 70%, 72%, 75%, 77%, 80%, 82%, 85%, 87%, 90%, 92%, 95%, 97%, 98%, 99% identical to SEQ ID NO: 182, or a polypeptide sequence which is at least 60%, 62%, 65%, 67%, 70%, 72%, 75%, 77%, 80%, 82%, 85%, 87%, 90%, 92%, 95%, 97%, 98%, 99% identical to SEQ ID NO: 186.

[0327] In some embodiments, variable domain of the first heavy chain comprises a polypeptide sequence which is at least 60%, 62%, 65%, 67%, 70%, 72%, 75%, 77%, 80%, 82%, 85%, 87%, 90%, 92%, 95%, 97%, 98%, 99% identical to SEQ ID NO: 15, a polypeptide sequence which is at least 60%, 62%, 65%, 67%, 70%, 72%, 75%, 77%, 80%, 82%, 85%, 87%, 90%, 92%, 95%, 97%, 98%, 99% identical to SEQ ID NO: 27, a polypeptide sequence which is at least 60%, 62%, 65%, 67%, 70%, 72%, 75%, 77%, 80%, 82%, 85%, 87%, 90%, 92%, 95%, 97%, 98%, 99% identical to SEQ ID NO: 35, a polypeptide sequence which is at least 60%, 62%, 65%, 67%, 70%, 72%, 75%, 77%, 80%, 82%, 85%, 87%, 90%, 92%, 95%, 97%, 98%, 99% identical to SEQ ID NO: 25, a polypeptide sequence which is at least 60%, 62%, 65%, 67%, 70%, 72%, 75%, 77%, 80%, 82%, 85%, 87%, 90%, 92%, 95%, 97%, 98%, 99% identical to SEQ ID NO: 17, a polypeptide sequence which is at least 60%, 62%, 65%, 67%, 70%, 72%, 75%, 77%, 80%, 82%, 85%, 87%, 90%, 92%, 95%, 97%, 98%, 99% identical to SEQ ID NO: 37, a polypeptide sequence which is at least 60%, 62%, 65%, 67%, 70%, 72%, 75%, 77%, 80%, 82%, 85%, 87%, 90%, 92%, 95%, 97%, 98%, 99% identical to SEQ ID NO: 19, a polypeptide sequence which is at least 60%, 62%, 65%, 67%, 70%, 72%, 75%, 77%, 80%, 82%, 85%, 87%, 90%, 92%, 95%, 97%, 98%, 99% identical to SEQ ID NO: 13, a polypeptide sequence which is at least 60%, 62%, 65%, 67%, 70%, 72%, 75%, 77%, 80%, 82%, 85%, 87%, 90%, 92%, 95%, 97%, 98%, 99% identical to SEQ ID NO: 5, a polypeptide sequence which is at least 60%, 62%, 65%, 67%, 70%, 72%, 75%, 77%, 80%, 82%, 85%, 87%, 90%, 92%, 95%, 97%, 98%, 99% identical to SEQ ID NO: 21, or a polypeptide sequence which is at least 60%, 62%, 65%, 67%, 70%, 72%, 75%, 77%, 80%, 82%, 85%, 87%, 90%, 92%, 95%, 97%, 98%, 99% identical to SEQ ID NO: 41.

[0328] In some embodiments, variable domain of the first light chain comprises a polypeptide sequence which is at least 60%, 62%, 65%, 67%, 70%, 72%, 75%, 77%, 80%, 82%, 85%, 87%, 90%, 92%, 95%, 97%, 98%, 99% identical to SEQ ID NO: 16, a polypeptide sequence which is at least 60%, 62%, 65%, 67%, 70%, 72%, 75%, 77%, 80%, 82%, 85%, 87%, 90%, 92%, 95%, 97%, 98%, 99% identical to SEQ ID NO: 28, a polypeptide sequence which is at least 60%, 62%, 65%, 67%, 70%, 72%, 75%, 77%, 80%, 82%, 85%, 87%, 90%, 92%, 95%, 97%, 98%, 99% identical to SEQ ID NO: 36, a polypeptide sequence which is at least 60%, 62%, 65%, 67%, 70%, 72%, 75%, 77%, 80%, 82%, 85%, 87%, 90%, 92%, 95%, 97%, 98%, 99% identical to SEQ ID NO: 26, a polypeptide sequence which is at least 60%, 62%, 65%, 67%, 70%, 72%, 75%, 77%, 80%, 82%, 85%, 87%, 90%, 92%, 95%, 97%, 98%, 99% identical to SEQ ID NO: 18, a polypeptide sequence which is at least 60%, 62%, 65%, 67%, 70%, 72%, 75%, 77%, 80%, 82%, 85%, 87%, 90%, 92%, 95%, 97%, 98%, 99% identical to SEQ ID NO: 38, a polypeptide sequence which is at least 60%, 62%, 65%, 67%, 70%, 72%, 75%, 77%, 80%, 82%, 85%, 87%, 90%, 92%, 95%, 97%, 98%, 99% identical to SEQ ID NO: 20, a polypeptide sequence which is at least 60%, 62%, 65%, 67%, 70%, 72%, 75%, 77%, 80%, 82%, 85%, 87%, 90%, 92%, 95%, 97%, 98%, 99% identical to SEQ ID NO: 14, a polypeptide sequence which is at least 60%, 62%, 65%, 67%, 70%, 72%, 75%, 77%, 80%, 82%, 85%, 87%, 90%, 92%, 95%, 97%, 98%, 99% identical to SEQ ID NO: 6, a polypeptide sequence which is at least 60%, 62%, 65%, 67%, 70%, 72%, 75%, 77%, 80%, 82%, 85%, 87%, 90%, 92%, 95%, 97%, 98%, 99% identical to SEQ ID NO: 22, or a polypeptide sequence which is at least 60%, 62%, 65%, 67%, 70%, 72%, 75%, 77%, 80%, 82%, 85%, 87%, 90%, 92%, 95%, 97%, 98%, 99% identical to SEQ ID NO: 42.

[0329] In some embodiments, variable domain of the second heavy chain comprises a polypeptide sequence which is at least 60%, 62%, 65%, 67%, 70%, 72%, 75%, 77%, 80%, 82%, 85%, 87%, 90%, 92%, 95%, 97%, 98%, 99% identical to SEQ ID NO: 27, a polypeptide sequence which is at least 60%, 62%, 65%, 67%, 70%, 72%, 75%, 77%, 80%, 82%, 85%, 87%, 90%, 92%, 95%, 97%, 98%, 99% identical to SEQ ID NO: 15, a polypeptide sequence which is at least 60%, 62%, 65%, 67%, 70%, 72%, 75%, 77%, 80%, 82%, 85%, 87%, 90%, 92%, 95%, 97%, 98%, 99% identical to SEQ ID NO: 5, a polypeptide sequence which is at least 60%, 62%, 65%, 67%, 70%, 72%, 75%, 77%, 80%, 82%, 85%, 87%, 90%, 92%, 95%, 97%, 98%, 99% identical to SEQ ID NO: 19, a polypeptide sequence which is at least 60%, 62%, 65%, 67%, 70%, 72%, 75%, 77%, 80%, 82%, 85%, 87%, 90%, 92%, 95%, 97%, 98%, 99% identical to SEQ ID NO: 21, a polypeptide sequence which is at least 60%, 62%, 65%, 67%, 70%, 72%, 75%, 77%, 80%, 82%, 85%, 87%, 90%, 92%, 95%, 97%, 98%, 99% identical to SEQ ID NO: 15, a polypeptide sequence which is at least 60%, 62%, 65%, 67%, 70%, 72%, 75%, 77%, 80%, 82%, 85%, 87%, 90%, 92%, 95%, 97%, 98%, 99% identical to SEQ ID NO: 29, a polypeptide sequence which is at least 60%, 62%, 65%, 67%, 70%, 72%, 75%, 77%, 80%, 82%, 85%, 87%, 90%, 92%, 95%, 97%, 98%, 99% identical to SEQ ID NO: 35, a polypeptide sequence which is at least 60%, 62%, 65%, 67%, 70%, 72%, 75%, 77%, 80%, 82%, 85%, 87%, 90%, 92%, 95%, 97%, 98%, 99% identical to SEQ ID NO: 23, a polypeptide sequence which is at least 60%, 62%, 65%, 67%, 70%, 72%, 75%, 77%, 80%, 82%, 85%, 87%, 90%, 92%, 95%, 97%, 98%, 99% identical to SEQ ID NO: 25, a polypeptide sequence which is at least 60%, 62%, 65%, 67%, 70%, 72%, 75%, 77%, 80%, 82%, 85%, 87%, 90%, 92%, 95%, 97%, 98%, 99% identical to SEQ ID NO: 37, a polypeptide sequence which is at least 60%, 62%, 65%, 67%, 70%, 72%, 75%, 77%, 80%, 82%, 85%, 87%, 90%, 92%, 95%, 97%, 98%, 99% identical to SEQ ID NO: 39, a polypeptide sequence which is at least 60%, 62%, 65%, 67%, 70%, 72%, 75%, 77%, 80%, 82%, 85%, 87%, 90%, 92%, 95%, 97%, 98%, 99% identical to SEQ ID NO: 43, or a polypeptide sequence which is at least 60%, 62%, 65%, 67%, 70%, 72%, 75%, 77%, 80%, 82%, 85%, 87%, 90%, 92%, 95%, 97%, 98%, 99% identical to SEQ ID NO: 9.

[0330] In some embodiments, variable domain of the second light chain comprises a polypeptide sequence which is at least 60%, 62%, 65%, 67%, 70%, 72%, 75%, 77%, 80%, 82%, 85%, 87%, 90%, 92%, 95%, 97%, 98%, 99% identical to SEQ ID NO: 28, a polypeptide sequence which is at least 60%, 62%, 65%, 67%, 70%, 72%, 75%, 77%, 80%, 82%, 85%, 87%, 90%, 92%, 95%, 97%, 98%, 99% identical to SEQ ID NO: 16, a polypeptide sequence which is at least 60%, 62%, 65%, 67%, 70%, 72%, 75%, 77%, 80%, 82%, 85%, 87%, 90%, 92%, 95%, 97%, 98%, 99% identical to SEQ ID NO: 6, a polypeptide sequence which is at least 60%, 62%, 65%, 67%, 70%, 72%, 75%, 77%, 80%, 82%, 85%, 87%, 90%, 92%, 95%, 97%, 98%, 99% identical to SEQ ID NO: 20, a polypeptide sequence which is at least 60%, 62%, 65%, 67%, 70%, 72%, 75%, 77%, 80%, 82%, 85%, 87%, 90%, 92%, 95%, 97%, 98%, 99% identical to SEQ ID NO: 22, a polypeptide sequence which is at least 60%, 62%, 65%, 67%, 70%, 72%, 75%, 77%, 80%, 82%, 85%, 87%, 90%, 92%, 95%, 97%, 98%, 99% identical to SEQ ID NO: 16, a polypeptide sequence which is at least 60%, 62%, 65%, 67%, 70%, 72%, 75%, 77%, 80%, 82%, 85%, 87%, 90%, 92%, 95%, 97%, 98%, 99% identical to SEQ ID NO: 30, a polypeptide sequence which is at least 60%, 62%, 65%, 67%, 70%, 72%, 75%, 77%, 80%, 82%, 85%, 87%, 90%, 92%, 95%, 97%, 98%, 99% identical to SEQ ID NO: 36, a polypeptide sequence which is at least 60%, 62%, 65%, 67%, 70%, 72%, 75%, 77%, 80%, 82%, 85%, 87%, 90%, 92%, 95%, 97%, 98%, 99% identical to SEQ ID NO: 24, a polypeptide sequence which is at least 60%, 62%, 65%, 67%, 70%, 72%, 75%, 77%, 80%, 82%, 85%, 87%, 90%, 92%, 95%, 97%, 98%, 99% identical to SEQ ID NO: 26, a polypeptide sequence which is at least 60%, 62%, 65%, 67%, 70%, 72%, 75%, 77%, 80%, 82%, 85%, 87%, 90%, 92%, 95%, 97%, 98%, 99% identical to SEQ ID NO: 38, a polypeptide sequence which is at least 60%, 62%, 65%, 67%, 70%, 72%, 75%, 77%, 80%, 82%, 85%, 87%, 90%, 92%, 95%, 97%, 98%, 99% identical to SEQ ID NO: 40, a polypeptide sequence which is at least 60%, 62%, 65%, 67%, 70%, 72%, 75%, 77%, 80%, 82%, 85%, 87%, 90%, 92%, 95%, 97%, 98%, 99% identical to SEQ ID NO: 44, or a polypeptide sequence which is at least 60%, 62%, 65%, 67%, 70%, 72%, 75%, 77%, 80%, 82%, 85%, 87%, 90%, 92%, 95%, 97%, 98%, 99% identical to SEQ ID NO: 10.

[0331] In some embodiments, the variable domain of the first heavy chain comprises the CDR1, CDR2, and CDR3 of SEQ ID NO: 51; the CDR1, CDR2, and CDR3 of SEQ ID NO: 55; the CDR1, CDR2, and CDR3 of SEQ ID NO: 67; the CDR1, CDR2, and CDR3 of SEQ ID NO: 71; the CDR1, CDR2, and CDR3 of SEQ ID NO: 75; the CDR1, CDR2, and CDR3 of SEQ ID NO: 79; the CDR1, CDR2, and CDR3 of SEQ ID NO: 83; the CDR1, CDR2, and CDR3 of SEQ ID NO: 87; the CDR1, CDR2, and CDR3 of SEQ ID NO: 91; the CDR1, CDR2, and CDR3 of SEQ ID NO: 95; the CDR1, CDR2, and CDR3 of SEQ ID NO: 99; the CDR1, CDR2, and CDR3 of SEQ ID NO: 103; the CDR1, CDR2, and CDR3 of SEQ ID NO: 107; the CDR1, CDR2, and CDR3 of SEQ ID NO: 115; the CDR1, CDR2, and CDR3 of SEQ ID NO: 119, the CDR1, CDR2, and CDR3 of SEQ ID NO: 123, the CDR1, CDR2, and CDR3 of SEQ ID NO: 127; the CDR1, CDR2, and CDR3 of SEQ ID NO: 131; the CDR1, CDR2, and CDR3 of SEQ ID NO: 139; the CDR1, CDR2, and CDR3 of SEQ ID NO: 143; the CDR1, CDR2, and CDR3 of SEQ ID NO: 147; the CDR1, CDR2, and CDR3 of SEQ ID NO: 151; the CDR1, CDR2, and CDR3 of SEQ ID NO: 155; the CDR1, CDR2, and CDR3 of SEQ ID NO: 159; the CDR1, CDR2, and CDR3 of SEQ ID NO: 163; the CDR1, CDR2, and CDR3 of SEQ ID NO: 167, the CDR1, CDR2, and CDR3 of SEQ ID NO: 171, the CDR1, CDR2, and CDR3 of SEQ ID NO: 175, the CDR1, CDR2, and CDR3 of SEQ ID NO: 179, or the CDR1, CDR2, and CDR3 of SEQ ID NO: 183.

[0332] In some embodiments, the variable domain of the first light chain comprises the CDR1, CDR2, and CDR3 of SEQ ID NO: 52; the CDR1, CDR2, and CDR3 of SEQ ID NO: 56; the CDR1, CDR2, and CDR3 of SEQ ID NO: 68; the CDR1, CDR2, and CDR3 of SEQ ID NO: 72; the CDR1, CDR2, and CDR3 of SEQ ID NO: 76; the CDR1, CDR2, and CDR3 of SEQ ID NO: 80; the CDR1, CDR2, and CDR3 of SEQ ID NO: 84; the CDR1, CDR2, and CDR3 of SEQ ID NO: 88; the CDR1, CDR2, and CDR3 of SEQ ID NO: 92; the CDR1, CDR2, and CDR3 of SEQ ID NO: 96; the CDR1, CDR2, and CDR3 of SEQ ID NO: 100; the CDR1, CDR2, and CDR3 of SEQ ID NO: 104; the CDR1, CDR2, and CDR3 of SEQ ID NO: 108; the CDR1, CDR2, and CDR3 of SEQ ID NO: 116; the CDR1, CDR2, and CDR3 of SEQ ID NO: 120; the CDR1, CDR2, and CDR3 of SEQ ID NO: 124; the CDR1, CDR2, and CDR3 of SEQ ID NO: 128; the CDR1, CDR2, and CDR3 of SEQ ID NO: 132; the CDR1, CDR2, and CDR3 of SEQ ID NO: 140; the CDR1, CDR2, and CDR3 of SEQ ID NO: 144; the CDR1, CDR2, and CDR3 of SEQ ID NO: 148; the CDR1, CDR2, and CDR3 of SEQ ID NO: 152; the CDR1, CDR2, and CDR3 of SEQ ID NO: 156; the CDR1, CDR2, and CDR3 of SEQ ID NO: 160; the CDR1, CDR2, and CDR3 of SEQ ID NO: 164; the CDR1, CDR2, and CDR3 of SEQ ID NO: 168, the CDR1, CDR2, and CDR3 of SEQ ID NO: 172, the CDR1, CDR2, and CDR3 of SEQ ID NO: 176, the CDR1, CDR2, and CDR3 of SEQ ID NO: 180, or the CDR1, CDR2, and CDR3 of SEQ ID NO: 184.

[0333] In some embodiments, the variable domain of the second heavy chain comprises the CDR1, CDR2, and CDR3 of SEQ ID NO: 53; the CDR1, CDR2, and CDR3 of SEQ ID NO: 57; the CDR1, CDR2, and CDR3 of SEQ ID NO: 69; the CDR1, CDR2, and CDR3 of SEQ ID NO: 73; the CDR1, CDR2, and CDR3 of SEQ ID NO: 77; the CDR1, CDR2, and CDR3 of SEQ ID NO: 81; the CDR1, CDR2, and CDR3 of SEQ ID NO: 85; the CDR1, CDR2, and CDR3 of SEQ ID NO: 89; the CDR1, CDR2, and CDR3 of SEQ ID NO: 93; the CDR1, CDR2, and CDR3 of SEQ ID NO: 97; the CDR1, CDR2, and CDR3 of SEQ ID NO: 101; the CDR1, CDR2, and CDR3 of SEQ ID NO: 105; the CDR1, CDR2, and CDR3 of SEQ ID NO: 109; the CDR1, CDR2, and CDR3 of SEQ ID NO: 117; the CDR1, CDR2, and CDR3 of SEQ ID NO: 121; the CDR1, CDR2, and CDR3 of SEQ ID NO: 125; the CDR1, CDR2, and CDR3 of SEQ ID NO: 129; the CDR1, CDR2, and CDR3 of SEQ ID NO: 133; the CDR1, CDR2, and CDR3 of SEQ ID NO: 141; the CDR1, CDR2, and CDR3 of SEQ ID NO: 145; the CDR1, CDR2, and CDR3 of SEQ ID NO: 149; the CDR1, CDR2, and CDR3 of SEQ ID NO: 153; the CDR1, CDR2, and CDR3 of SEQ ID NO: 157; the CDR1, CDR2, and CDR3 of SEQ ID NO: 161; the CDR1, CDR2, and CDR3 of SEQ ID NO: 165; the CDR1, CDR2, and CDR3 of SEQ ID NO: 169, the CDR1, CDR2, and CDR3 of SEQ ID NO: 173, the CDR1, CDR2, and CDR3 of SEQ ID NO: 177, the CDR1, CDR2, and CDR3 of SEQ ID NO: 181, or the CDR1, CDR2, and CDR3 of SEQ ID NO: 185.

[0334] In some embodiments, the variable domain of the second light chain comprises the CDR1, CDR2, and CDR3 of SEQ ID NO: 54; the CDR1, CDR2, and CDR3 of SEQ ID NO: 58; the CDR1, CDR2, and CDR3 of SEQ ID NO: 70; the CDR1, CDR2, and CDR3 of SEQ ID NO: 74; the CDR1, CDR2, and CDR3 of SEQ ID NO: 78; the CDR1, CDR2, and CDR3 of SEQ ID NO: 82; the CDR1, CDR2, and CDR3 of SEQ ID NO: 86; the CDR1, CDR2, and CDR3 of SEQ ID NO: 90; the CDR1, CDR2, and CDR3 of SEQ ID NO: 94; the CDR1, CDR2, and CDR3 of SEQ ID NO: 98; the CDR1, CDR2, and CDR3 of SEQ ID NO: 102; the CDR1, CDR2, and CDR3 of SEQ ID NO: 106; the CDR1, CDR2, and CDR3 of SEQ ID NO: 110; the CDR1, CDR2, and CDR3 of SEQ ID NO: 118; the CDR1, CDR2, and CDR3 of SEQ ID NO: 122; the CDR1, CDR2, and CDR3 of SEQ ID NO: 126; the CDR1, CDR2, and CDR3 of SEQ ID NO: 130; the CDR1, CDR2, and CDR3 of SEQ ID NO: 134; the CDR1, CDR2, and CDR3 of SEQ ID NO: 142; the CDR1, CDR2, and CDR3 of SEQ ID NO: 146; the CDR1, CDR2, and CDR3 of SEQ ID NO: 150; the CDR1, CDR2, and CDR3 of SEQ ID NO: 154; the CDR1, CDR2, and CDR3 of SEQ ID NO: 158; the CDR1, CDR2, and CDR3 of SEQ ID NO: 162, the CDR1, CDR2, and CDR3 of SEQ ID NO: 166; the CDR1, CDR2, and CDR3 of SEQ ID NO: 170, the CDR1, CDR2, and CDR3 of SEQ ID NO: 174, the CDR1, CDR2, and CDR3 of SEQ ID NO: 178, the CDR1, CDR2, and CDR3 of SEQ ID NO: 182, or the CDR1, CDR2, and CDR3 of SEQ ID NO: 186.

[0335] In some embodiments, the molecule comprises SEQ ID NO: 51, SEQ ID NO: 52, SEQ ID NO: 53, and SEQ ID NO: 54. In some embodiments, the molecule comprises SEQ ID NO: 55, SEQ ID NO: 56, SEQ ID NO: 57, and SEQ ID NO: 58. In some embodiments, the molecule comprises SEQ ID NO: 67, SEQ ID NO: 68, SEQ ID NO: 69, and SEQ ID NO: 70. In some embodiments, the molecule comprises SEQ ID NO: 71, SEQ ID NO: 72, SEQ ID NO: 73, and SEQ ID NO: 74. In some embodiments, the molecule comprises SEQ ID NO: 75, SEQ ID NO: 76, SEQ ID NO: 77, and SEQ ID NO: 78. In some embodiments, the molecule comprises SEQ ID NO: 79, SEQ ID NO: 80, SEQ ID NO: 81, and SEQ ID NO: 82. In some embodiments, the molecule comprises SEQ ID NO: 83, SEQ ID NO: 84, SEQ ID NO: 85, and SEQ ID NO: 86. In some embodiments, the molecule comprises SEQ ID NO: 87, SEQ ID NO: 88, SEQ ID NO: 89, and SEQ ID NO: 90. In some embodiments, the molecule comprises SEQ ID NO: 91, SEQ ID NO: 92, SEQ ID NO: 93, and SEQ ID NO: 94. In some embodiments, the molecule comprises SEQ ID NO: 95, SEQ ID NO: 96, SEQ ID NO: 97, and SEQ ID NO: 98. In some embodiments, the molecule comprises SEQ ID NO: 99, SEQ ID NO: 100, SEQ ID NO: 101, and SEQ ID NO: 102. In some embodiments, the molecule comprises SEQ ID NO: 103, SEQ ID NO: 104, SEQ ID NO: 105, and SEQ ID NO: 106. In some embodiments, the molecule comprises SEQ ID NO: 107, SEQ ID NO: 108, SEQ ID NO: 109, and SEQ ID NO: 110. In some embodiments, the molecule comprises SEQ ID NO: 115, SEQ ID NO: 116, SEQ ID NO: 117, and SEQ ID NO: 118. In some embodiments, the molecule comprises SEQ ID NO: 119, SEQ ID NO: 120, SEQ ID NO: 121, and SEQ ID NO: 122.

[0336] In some embodiments, the molecule comprises SEQ ID NO: 123, SEQ ID NO: 124, SEQ ID NO: 125, and SEQ ID NO: 126. In some embodiments, the molecule comprises SEQ ID NO: 127, SEQ ID NO: 128, SEQ ID NO: 129, and SEQ ID NO: 130. In some embodiments, the molecule comprises SEQ ID NO: 131, SEQ ID NO: 132, SEQ ID NO: 133, and SEQ ID NO: 133. In some embodiments, the molecule comprises SEQ ID NO: 139, SEQ ID NO: 140, SEQ ID NO: 141, and SEQ ID NO: 142. In some embodiments, the molecule comprises SEQ ID NO: 143, SEQ ID NO: 144, SEQ ID NO: 145, and SEQ ID NO: 146. In some embodiments, the molecule comprises SEQ ID NO: 147, SEQ ID NO: 148, SEQ ID NO: 149, and SEQ ID NO: 150. In some embodiments, the molecule comprises SEQ ID NO: 151, SEQ ID NO: 152, SEQ ID NO: 153, and SEQ ID NO: 154. In some embodiments, the molecule comprises SEQ ID NO: 155, SEQ ID NO: 156, SEQ ID NO: 157, and SEQ ID NO: 158. In some embodiments, the molecule comprises SEQ ID NO: 159, SEQ ID NO: 160, SEQ ID NO: 161, and SEQ ID NO: 162. In some embodiments, the molecule comprises SEQ ID NO: 163, SEQ ID NO: 164, SEQ ID NO: 165, and SEQ ID NO: 166. In some embodiments, the molecule comprises SEQ ID NO: 167, SEQ ID NO: 168, SEQ ID NO: 169, and SEQ ID NO: 170. In some embodiments, the molecule comprises SEQ ID NO: 171, SEQ ID NO: 172, SEQ ID NO: 173, and SEQ ID NO: 174. In some embodiments, the molecule comprises SEQ ID NO: 175, SEQ ID NO: 176, SEQ ID NO: 177, and SEQ ID NO: 178. In some embodiments, the molecule comprises SEQ ID NO: 179, SEQ ID NO: 180, SEQ ID NO: 181, and SEQ ID NO: 182. In some embodiments, the molecule comprises SEQ ID NO: 183, SEQ ID NO: 184, SEQ ID NO: 185, and SEQ ID NO: 186.

[0337] In some embodiments, the molecule further comprises one or more disulfide bonds. In some embodiments, the molecule further comprises one or more linker sequences. In some embodiments, the molecule is capable of neutralizing a coronavirus. In some embodiments, the coronavirus is a SARS-CoV-2 virus. In some embodiments, the SARS-CoV-2 virus strain is selected from the group consisting of WA1, B.1.1.7, B1.526, B1.351, P1, B1.352, and B.1.427.

[0338] In some embodiments, the molecule specifically recognizes a first epitope and a second epitope on a SARS-CoV-2 particle. In some embodiments, the first epitope comprises at least a portion of a receptor binding domain (RBD) on a spike protein of a SARS-CoV-2 particle. In some embodiments, the second epitope comprises at least a portion of a N-terminal domain (NTD) on a spike protein of a SARS-CoV-2 particle.

[0339] In certain aspects, the invention provides a method of treating or preventing a COVID-19 infection in a subject in need thereof, the method comprising administering to the subject a composition comprising a bispecific molecule comprising a first polypeptide chain and a second polypeptide chain, wherein: the first polypeptide chain comprises: a first light chain comprising a variable domain and a constant domain; a first heavy chain comprising a variable domain and a constant domain; the second polypeptide chain comprises: a second light chain comprising a variable domain and a constant domain; and a second heavy chain comprising a variable domain and a constant domain.

[0340] In some embodiments, the first polypeptide chain and the second polypeptide chain are covalently bonded to one another. In some embodiments, the first heavy chain comprises a polypeptide sequence which is at least 60%, 62%, 65%, 67%, 70%, 72%, 75%, 77%, 80%, 82%, 85%, 87%, 90%, 92%, 95%, 97%, 98%, 99% identical to SEQ ID NO: 51, a polypeptide sequence which is at least 60%, 62%, 65%, 67%, 70%, 72%, 75%, 77%, 80%, 82%, 85%, 87%, 90%, 92%, 95%, 97%, 98%, 99% identical to SEQ ID NO: 55, a polypeptide sequence which is at least 60%, 62%, 65%, 67%, 70%, 72%, 75%, 77%, 80%, 82%, 85%, 87%, 90%, 92%, 95%, 97%, 98%, 99% identical to SEQ ID NO: 67, a polypeptide sequence which is at least 60%, 62%, 65%, 67%, 70%, 72%, 75%, 77%, 80%, 82%, 85%, 87%, 90%, 92%, 95%, 97%, 98%, 99% identical to SEQ ID NO: 71, a polypeptide sequence which is at least 60%, 62%, 65%, 67%, 70%, 72%, 75%, 77%, 80%, 82%, 85%, 87%, 90%, 92%, 95%, 97%, 98%, 99% identical to SEQ ID NO: 75, a polypeptide sequence which is at least 60%, 62%, 65%, 67%, 70%, 72%, 75%, 77%, 80%, 82%, 85%, 87%, 90%, 92%, 95%, 97%, 98%, 99% identical to SEQ ID NO: 79, a polypeptide sequence which is at least 60%, 62%, 65%, 67%, 70%, 72%, 75%, 77%, 80%, 82%, 85%, 87%, 90%, 92%, 95%, 97%, 98%, 99% identical to SEQ ID NO: 83, a polypeptide sequence which is at least 60%, 62%, 65%, 67%, 70%, 72%, 75%, 77%, 80%, 82%, 85%, 87%, 90%, 92%, 95%, 97%, 98%, 99% identical to SEQ ID NO: 87, a polypeptide sequence which is at least 60%, 62%, 65%, 67%, 70%, 72%, 75%, 77%, 80%, 82%, 85%, 87%, 90%, 92%, 95%, 97%, 98%, 99% identical to SEQ ID NO: 91, a polypeptide sequence which is at least 60%, 62%, 65%, 67%, 70%, 72%, 75%, 77%, 80%, 82%, 85%, 87%, 90%, 92%, 95%, 97%, 98%, 99% identical to SEQ ID NO: 95, a polypeptide sequence which is at least 60%, 62%, 65%, 67%, 70%, 72%, 75%, 77%, 80%, 82%, 85%, 87%, 90%, 92%, 95%, 97%, 98%, 99% identical to SEQ ID NO: 99, a polypeptide sequence which is at least 60%, 62%, 65%, 67%, 70%, 72%, 75%, 77%, 80%, 82%, 85%, 87%, 90%, 92%, 95%, 97%, 98%, 99% identical to SEQ ID NO: 103, a polypeptide sequence which is at least 60%, 62%, 65%, 67%, 70%, 72%, 75%, 77%, 80%, 82%, 85%, 87%, 90%, 92%, 95%, 97%, 98%, 99% identical to SEQ ID NO: 107, a polypeptide sequence which is at least 60%, 62%, 65%, 67%, 70%, 72%, 75%, 77%, 80%, 82%, 85%, 87%, 90%, 92%, 95%, 97%, 98%, 99% identical to SEQ ID NO: 115, a polypeptide sequence which is at least 60%, 62%, 65%, 67%, 70%, 72%, 75%, 77%, 80%, 82%, 85%, 87%, 90%, 92%, 95%, 97%, 98%, 99% identical to SEQ ID NO: 119, a polypeptide sequence which is at least 60%, 62%, 65%, 67%, 70%, 72%, 75%, 77%, 80%, 82%, 85%, 87%, 90%, 92%, 95%, 97%, 98%, 99% identical to SEQ ID NO: 123, a polypeptide sequence which is at least 60%, 62%, 65%, 67%, 70%, 72%, 75%, 77%, 80%, 82%, 85%, 87%, 90%, 92%, 95%, 97%, 98%, 99% identical to SEQ ID NO: 127, a polypeptide sequence which is at least 60%, 62%, 65%, 67%, 70%, 72%, 75%, 77%, 80%, 82%, 85%, 87%, 90%, 92%, 95%, 97%, 98%, 99% identical to SEQ ID NO: 131, a polypeptide sequence which is at least 60%, 62%, 65%, 67%, 70%, 72%, 75%, 77%, 80%, 82%, 85%, 87%, 90%, 92%, 95%, 97%, 98%, 99% identical to SEQ ID NO: 139, a polypeptide sequence which is at least 60%, 62%, 65%, 67%, 70%, 72%, 75%, 77%, 80%, 82%, 85%, 87%, 90%, 92%, 95%, 97%, 98%, 99% identical to SEQ ID NO: 143, a polypeptide sequence which is at least 60%, 62%, 65%, 67%, 70%, 72%, 75%, 77%, 80%, 82%, 85%, 87%, 90%, 92%, 95%, 97%, 98%, 99% identical to SEQ ID NO: 147, a polypeptide sequence which is at least 60%, 62%, 65%, 67%, 70%, 72%, 75%, 77%, 80%, 82%, 85%, 87%, 90%, 92%, 95%, 97%, 98%, 99% identical to SEQ ID NO: 151, a polypeptide sequence which is at least 60%, 62%, 65%, 67%, 70%, 72%, 75%, 77%, 80%, 82%, 85%, 87%, 90%, 92%, 95%, 97%, 98%, 99% identical to SEQ ID NO: 155, a polypeptide sequence which is at least 60%, 62%, 65%, 67%, 70%, 72%, 75%, 77%, 80%, 82%, 85%, 87%, 90%, 92%, 95%, 97%, 98%, 99% identical to SEQ ID NO: 159, a polypeptide sequence which is at least 60%, 62%, 65%, 67%, 70%, 72%, 75%, 77%, 80%, 82%, 85%, 87%, 90%, 92%, 95%, 97%, 98%, 99% identical to SEQ ID NO: 163, a polypeptide sequence which is at least 60%, 62%, 65%, 67%, 70%, 72%, 75%, 77%, 80%, 82%, 85%, 87%, 90%, 92%, 95%, 97%, 98%, 99% identical to SEQ ID NO: 167, a polypeptide sequence which is at least 60%, 62%, 65%, 67%, 70%, 72%, 75%, 77%, 80%, 82%, 85%, 87%, 90%, 92%, 95%, 97%, 98%, 99% identical to SEQ ID NO: 171, a polypeptide sequence which is at least 60%, 62%, 65%, 67%, 70%, 72%, 75%, 77%, 80%, 82%, 85%, 87%, 90%, 92%, 95%, 97%, 98%, 99% identical to SEQ ID NO: 175, a polypeptide sequence which is at least 60%, 62%, 65%, 67%, 70%, 72%, 75%, 77%, 80%, 82%, 85%, 87%, 90%, 92%, 95%, 97%, 98%, 99% identical to SEQ ID NO: 179, or a polypeptide sequence which is at least 60%, 62%, 65%, 67%, 70%, 72%, 75%, 77%, 80%, 82%, 85%, 87%, 90%, 92%, 95%, 97%, 98%, 99% identical to SEQ ID NO:183.

[0341] In some embodiments, the first light chain comprises a polypeptide sequence which is at least 60%, 62%, 65%, 67%, 70%, 72%, 75%, 77%, 80%, 82%, 85%, 87%, 90%, 92%, 95%, 97%, 98%, 99% identical to SEQ ID NO: 52, a polypeptide sequence which is at least 60%, 62%, 65%, 67%, 70%, 72%, 75%, 77%, 80%, 82%, 85%, 87%, 90%, 92%, 95%, 97%, 98%, 99% identical to SEQ ID NO: 56, a polypeptide sequence which is at least 60%, 62%, 65%, 67%, 70%, 72%, 75%, 77%, 80%, 82%, 85%, 87%, 90%, 92%, 95%, 97%, 98%, 99% identical to SEQ ID NO: 68; a polypeptide sequence which is at least 60%, 62%, 65%, 67%, 70%, 72%, 75%, 77%, 80%, 82%, 85%, 87%, 90%, 92%, 95%, 97%, 98%, 99% identical to SEQ ID NO: 72, a polypeptide sequence which is at least 60%, 62%, 65%, 67%, 70%, 72%, 75%, 77%, 80%, 82%, 85%, 87%, 90%, 92%, 95%, 97%, 98%, 99% identical to SEQ ID NO: 76, a polypeptide sequence which is at least 60%, 62%, 65%, 67%, 70%, 72%, 75%, 77%, 80%, 82%, 85%, 87%, 90%, 92%, 95%, 97%, 98%, 99% identical to SEQ ID NO: 80, a polypeptide sequence which is at least 60%, 62%, 65%, 67%, 70%, 72%, 75%, 77%, 80%, 82%, 85%, 87%, 90%, 92%, 95%, 97%, 98%, 99% identical to SEQ ID NO: 84, a polypeptide sequence which is at least 60%, 62%, 65%, 67%, 70%, 72%, 75%, 77%, 80%, 82%, 85%, 87%, 90%, 92%, 95%, 97%, 98%, 99% identical to SEQ ID NO: 88, a polypeptide sequence which is at least 60%, 62%, 65%, 67%, 70%, 72%, 75%, 77%, 80%, 82%, 85%, 87%, 90%, 92%, 95%, 97%, 98%, 99% identical to SEQ ID NO: 92, a polypeptide sequence which is at least 60%, 62%, 65%, 67%, 70%, 72%, 75%, 77%, 80%, 82%, 85%, 87%, 90%, 92%, 95%, 97%, 98%, 99% identical to SEQ ID NO: 96, a polypeptide sequence which is at least 60%, 62%, 65%, 67%, 70%, 72%, 75%, 77%, 80%, 82%, 85%, 87%, 90%, 92%, 95%, 97%, 98%, 99% identical to SEQ ID NO: 100, a polypeptide sequence which is at least 60%, 62%, 65%, 67%, 70%, 72%, 75%, 77%, 80%, 82%, 85%, 87%, 90%, 92%, 95%, 97%, 98%, 99% identical to SEQ ID NO: 104, a polypeptide sequence which is at least 60%, 62%, 65%, 67%, 70%, 72%, 75%, 77%, 80%, 82%, 85%, 87%, 90%, 92%, 95%, 97%, 98%, 99% identical to SEQ ID NO: 108, a polypeptide sequence which is at least 60%, 62%, 65%, 67%, 70%, 72%, 75%, 77%, 80%, 82%, 85%, 87%, 90%, 92%, 95%, 97%, 98%, 99% identical to SEQ ID NO: 116, a polypeptide sequence which is at least 60%, 62%, 65%, 67%, 70%, 72%, 75%, 77%, 80%, 82%, 85%, 87%, 90%, 92%, 95%, 97%, 98%, 99% identical to SEQ ID NO: 120, a polypeptide sequence which is at least 60%, 62%, 65%, 67%, 70%, 72%, 75%, 77%, 80%, 82%, 85%, 87%, 90%, 92%, 95%, 97%, 98%, 99% identical to SEQ ID NO: 124, a polypeptide sequence which is at least 60%, 62%, 65%, 67%, 70%, 72%, 75%, 77%, 80%, 82%, 85%, 87%, 90%, 92%, 95%, 97%, 98%, 99% identical to SEQ ID NO: 128, a polypeptide sequence which is at least 60%, 62%, 65%, 67%, 70%, 72%, 75%, 77%, 80%, 82%, 85%, 87%, 90%, 92%, 95%, 97%, 98%, 99% identical to SEQ ID NO: 132, a polypeptide sequence which is at least 60%, 62%, 65%, 67%, 70%, 72%, 75%, 77%, 80%, 82%, 85%, 87%, 90%, 92%, 95%, 97%, 98%, 99% identical to SEQ ID NO: 140, a polypeptide sequence which is at least 60%, 62%, 65%, 67%, 70%, 72%, 75%, 77%, 80%, 82%, 85%, 87%, 90%, 92%, 95%, 97%, 98%, 99% identical to SEQ ID NO: 144, a polypeptide sequence which is at least 60%, 62%, 65%, 67%, 70%, 72%, 75%, 77%, 80%, 82%, 85%, 87%, 90%, 92%, 95%, 97%, 98%, 99% identical to SEQ ID NO: 148, a polypeptide sequence which is at least 60%, 62%, 65%, 67%, 70%, 72%, 75%, 77%, 80%, 82%, 85%, 87%, 90%, 92%, 95%, 97%, 98%, 99% identical to SEQ ID NO: 152, a polypeptide sequence which is at least 60%, 62%, 65%, 67%, 70%, 72%, 75%, 77%, 80%, 82%, 85%, 87%, 90%, 92%, 95%, 97%, 98%, 99% identical to SEQ ID NO: 156, a polypeptide sequence which is at least 60%, 62%, 65%, 67%, 70%, 72%, 75%, 77%, 80%, 82%, 85%, 87%, 90%, 92%, 95%, 97%, 98%, 99% identical to SEQ ID NO: 160, a polypeptide sequence which is at least 60%, 62%, 65%, 67%, 70%, 72%, 75%, 77%, 80%, 82%, 85%, 87%, 90%, 92%, 95%, 97%, 98%, 99% identical to SEQ ID NO: 164, a polypeptide sequence which is at least 60%, 62%, 65%, 67%, 70%, 72%, 75%, 77%, 80%, 82%, 85%, 87%, 90%, 92%, 95%, 97%, 98%, 99% identical to SEQ ID NO: 168, a polypeptide sequence which is at least 60%, 62%, 65%, 67%, 70%, 72%, 75%, 77%, 80%, 82%, 85%, 87%, 90%, 92%, 95%, 97%, 98%, 99% identical to SEQ ID NO: 172, a polypeptide sequence which is at least 60%, 62%, 65%, 67%, 70%, 72%, 75%, 77%, 80%, 82%, 85%, 87%, 90%, 92%, 95%, 97%, 98%, 99% identical to SEQ ID NO: 176, a polypeptide sequence which is at least 60%, 62%, 65%, 67%, 70%, 72%, 75%, 77%, 80%, 82%, 85%, 87%, 90%, 92%, 95%, 97%, 98%, 99% identical to SEQ ID NO: 180, or a polypeptide sequence which is at least 60%, 62%, 65%, 67%, 70%, 72%, 75%, 77%, 80%, 82%, 85%, 87%, 90%, 92%, 95%, 97%, 98%, 99% identical to SEQ ID NO:184.

[0342] In some embodiments, the second heavy chain comprises a polypeptide sequence which is at least 60%, 62%, 65%, 67%, 70%, 72%, 75%, 77%, 80%, 82%, 85%, 87%, 90%, 92%, 95%, 97%, 98%, 99% identical to SEQ ID NO: 53, a polypeptide sequence which is at least 60%, 62%, 65%, 67%, 70%, 72%, 75%, 77%, 80%, 82%, 85%, 87%, 90%, 92%, 95%, 97%, 98%, 99% identical to SEQ ID NO: 57, a polypeptide sequence which is at least 60%, 62%, 65%, 67%, 70%, 72%, 75%, 77%, 80%, 82%, 85%, 87%, 90%, 92%, 95%, 97%, 98%, 99% identical to SEQ ID NO: 69, a polypeptide sequence which is at least 60%, 62%, 65%, 67%, 70%, 72%, 75%, 77%, 80%, 82%, 85%, 87%, 90%, 92%, 95%, 97%, 98%, 99% identical to SEQ ID NO: 73, a polypeptide sequence which is at least 60%, 62%, 65%, 67%, 70%, 72%, 75%, 77%, 80%, 82%, 85%, 87%, 90%, 92%, 95%, 97%, 98%, 99% identical to SEQ ID NO: 77, a polypeptide sequence which is at least 60%, 62%, 65%, 67%, 70%, 72%, 75%, 77%, 80%, 82%, 85%, 87%, 90%, 92%, 95%, 97%, 98%, 99% identical to SEQ ID NO: 81, a polypeptide sequence which is at least 60%, 62%, 65%, 67%, 70%, 72%, 75%, 77%, 80%, 82%, 85%, 87%, 90%, 92%, 95%, 97%, 98%, 99% identical to SEQ ID NO: 85, a polypeptide sequence which is at least 60%, 62%, 65%, 67%, 70%, 72%, 75%, 77%, 80%, 82%, 85%, 87%, 90%, 92%, 95%, 97%, 98%, 99% identical to SEQ ID NO: 89, a polypeptide sequence which is at least 60%, 62%, 65%, 67%, 70%, 72%, 75%, 77%, 80%, 82%, 85%, 87%, 90%, 92%, 95%, 97%, 98%, 99% identical to SEQ ID NO: 93, a polypeptide sequence which is at least 60%, 62%, 65%, 67%, 70%, 72%, 75%, 77%, 80%, 82%, 85%, 87%, 90%, 92%, 95%, 97%, 98%, 99% identical to SEQ ID NO: 97, a polypeptide sequence which is at least 60%, 62%, 65%, 67%, 70%, 72%, 75%, 77%, 80%, 82%, 85%, 87%, 90%, 92%, 95%, 97%, 98%, 99% identical to SEQ ID NO: 101, a polypeptide sequence which is at least 60%, 62%, 65%, 67%, 70%, 72%, 75%, 77%, 80%, 82%, 85%, 87%, 90%, 92%, 95%, 97%, 98%, 99% identical to SEQ ID NO: 105, a polypeptide sequence which is at least 60%, 62%, 65%, 67%, 70%, 72%, 75%, 77%, 80%, 82%, 85%, 87%, 90%, 92%, 95%, 97%, 98%, 99% identical to SEQ ID NO: 109, a polypeptide sequence which is at least 60%, 62%, 65%, 67%, 70%, 72%, 75%, 77%, 80%, 82%, 85%, 87%, 90%, 92%, 95%, 97%, 98%, 99% identical to SEQ ID NO: 117, a polypeptide sequence which is at least 60%, 62%, 65%, 67%, 70%, 72%, 75%, 77%, 80%, 82%, 85%, 87%, 90%, 92%, 95%, 97%, 98%, 99% identical to SEQ ID NO: 121, a polypeptide sequence which is at least 60%, 62%, 65%, 67%, 70%, 72%, 75%, 77%, 80%, 82%, 85%, 87%, 90%, 92%, 95%, 97%, 98%, 99% identical to SEQ ID NO: 125, a polypeptide sequence which is at least 60%, 62%, 65%, 67%, 70%, 72%, 75%, 77%, 80%, 82%, 85%, 87%, 90%, 92%, 95%, 97%, 98%, 99% identical to SEQ ID NO: 129, a polypeptide sequence which is at least 60%, 62%, 65%, 67%, 70%, 72%, 75%, 77%, 80%, 82%, 85%, 87%, 90%, 92%, 95%, 97%, 98%, 99% identical to SEQ ID NO: 133, a polypeptide sequence which is at least 60%, 62%, 65%, 67%, 70%, 72%, 75%, 77%, 80%, 82%, 85%, 87%, 90%, 92%, 95%, 97%, 98%, 99% identical to SEQ ID NO: 141, a polypeptide sequence which is at least 60%, 62%, 65%, 67%, 70%, 72%, 75%, 77%, 80%, 82%, 85%, 87%, 90%, 92%, 95%, 97%, 98%, 99% identical to SEQ ID NO: 145, a polypeptide sequence which is at least 60%, 62%, 65%, 67%, 70%, 72%, 75%, 77%, 80%, 82%, 85%, 87%, 90%, 92%, 95%, 97%, 98%, 99% identical to SEQ ID NO: 149, a polypeptide sequence which is at least 60%, 62%, 65%, 67%, 70%, 72%, 75%, 77%, 80%, 82%, 85%, 87%, 90%, 92%, 95%, 97%, 98%, 99% identical to SEQ ID NO: 153, a polypeptide sequence which is at least 60%, 62%, 65%, 67%, 70%, 72%, 75%, 77%, 80%, 82%, 85%, 87%, 90%, 92%, 95%, 97%, 98%, 99% identical to SEQ ID NO: 157, a polypeptide sequence which is at least 60%, 62%, 65%, 67%, 70%, 72%, 75%, 77%, 80%, 82%, 85%, 87%, 90%, 92%, 95%, 97%, 98%, 99% identical to SEQ ID NO: 161, a polypeptide sequence which is at least 60%, 62%, 65%, 67%, 70%, 72%, 75%, 77%, 80%, 82%, 85%, 87%, 90%, 92%, 95%, 97%, 98%, 99% identical to SEQ ID NO: 165, a polypeptide sequence which is at least 60%, 62%, 65%, 67%, 70%, 72%, 75%, 77%, 80%, 82%, 85%, 87%, 90%, 92%, 95%, 97%, 98%, 99% identical to SEQ ID NO: 169, a polypeptide sequence which is at least 60%, 62%, 65%, 67%, 70%, 72%, 75%, 77%, 80%, 82%, 85%, 87%, 90%, 92%, 95%, 97%, 98%, 99% identical to SEQ ID NO: 173, a polypeptide sequence which is at least 60%, 62%, 65%, 67%, 70%, 72%, 75%, 77%, 80%, 82%, 85%, 87%, 90%, 92%, 95%, 97%, 98%, 99% identical to SEQ ID NO: 177, a polypeptide sequence which is at least 60%, 62%, 65%, 67%, 70%, 72%, 75%, 77%, 80%, 82%, 85%, 87%, 90%, 92%, 95%, 97%, 98%, 99% identical to SEQ ID NO: 181, or a polypeptide sequence which is at least 60%, 62%, 65%, 67%, 70%, 72%, 75%, 77%, 80%, 82%, 85%, 87%, 90%, 92%, 95%, 97%, 98%, 99% identical to SEQ ID NO: 185.

[0343] In some embodiments, the second light chain comprises a polypeptide sequence which is at least 60%, 62%, 65%, 67%, 70%, 72%, 75%, 77%, 80%, 82%, 85%, 87%, 90%, 92%, 95%, 97%, 98%, 99% identical to SEQ ID NO: 54, a polypeptide sequence which is at least 60%, 62%, 65%, 67%, 70%, 72%, 75%, 77%, 80%, 82%, 85%, 87%, 90%, 92%, 95%, 97%, 98%, 99% identical to SEQ ID NO: 58, a polypeptide sequence which is at least 60%, 62%, 65%, 67%, 70%, 72%, 75%, 77%, 80%, 82%, 85%, 87%, 90%, 92%, 95%, 97%, 98%, 99% identical to SEQ ID NO: 70, a polypeptide sequence which is at least 60%, 62%, 65%, 67%, 70%, 72%, 75%, 77%, 80%, 82%, 85%, 87%, 90%, 92%, 95%, 97%, 98%, 99% identical to SEQ ID NO: 74, a polypeptide sequence which is at least 60%, 62%, 65%, 67%, 70%, 72%, 75%, 77%, 80%, 82%, 85%, 87%, 90%, 92%, 95%, 97%, 98%, 99% identical to SEQ ID NO: 78, a polypeptide sequence which is at least 60%, 62%, 65%, 67%, 70%, 72%, 75%, 77%, 80%, 82%, 85%, 87%, 90%, 92%, 95%, 97%, 98%, 99% identical to SEQ ID NO: 82, a polypeptide sequence which is at least 60%, 62%, 65%, 67%, 70%, 72%, 75%, 77%, 80%, 82%, 85%, 87%, 90%, 92%, 95%, 97%, 98%, 99% identical to SEQ ID NO: 86, a polypeptide sequence which is at least 60%, 62%, 65%, 67%, 70%, 72%, 75%, 77%, 80%, 82%, 85%, 87%, 90%, 92%, 95%, 97%, 98%, 99% identical to SEQ ID NO: 90, a polypeptide sequence which is at least 60%, 62%, 65%, 67%, 70%, 72%, 75%, 77%, 80%, 82%, 85%, 87%, 90%, 92%, 95%, 97%, 98%, 99% identical to SEQ ID NO: 94, a polypeptide sequence which is at least 60%, 62%, 65%, 67%, 70%, 72%, 75%, 77%, 80%, 82%, 85%, 87%, 90%, 92%, 95%, 97%, 98%, 99% identical to SEQ ID NO: 98, a polypeptide sequence which is at least 60%, 62%, 65%, 67%, 70%, 72%, 75%, 77%, 80%, 82%, 85%, 87%, 90%, 92%, 95%, 97%, 98%, 99% identical to SEQ ID NO: 102, a polypeptide sequence which is at least 60%, 62%, 65%, 67%, 70%, 72%, 75%, 77%, 80%, 82%, 85%, 87%, 90%, 92%, 95%, 97%, 98%, 99% identical to SEQ ID NO: 106, a polypeptide sequence which is at least 60%, 62%, 65%, 67%, 70%, 72%, 75%, 77%, 80%, 82%, 85%, 87%, 90%, 92%, 95%, 97%, 98%, 99% identical to SEQ ID NO: 110, a polypeptide sequence which is at least 60%, 62%, 65%, 67%, 70%, 72%, 75%, 77%, 80%, 82%, 85%, 87%, 90%, 92%, 95%, 97%, 98%, 99% identical to SEQ ID NO: 118, a polypeptide sequence which is at least 60%, 62%, 65%, 67%, 70%, 72%, 75%, 77%, 80%, 82%, 85%, 87%, 90%, 92%, 95%, 97%, 98%, 99% identical to SEQ ID NO: 122, a polypeptide sequence which is at least 60%, 62%, 65%, 67%, 70%, 72%, 75%, 77%, 80%, 82%, 85%, 87%, 90%, 92%, 95%, 97%, 98%, 99% identical to SEQ ID NO: 126, a polypeptide sequence which is at least 60%, 62%, 65%, 67%, 70%, 72%, 75%, 77%, 80%, 82%, 85%, 87%, 90%, 92%, 95%, 97%, 98%, 99% identical to SEQ ID NO: 130, a polypeptide sequence which is at least 60%, 62%, 65%, 67%, 70%, 72%, 75%, 77%, 80%, 82%, 85%, 87%, 90%, 92%, 95%, 97%, 98%, 99% identical to SEQ ID NO: 134, a polypeptide sequence which is at least 60%, 62%, 65%, 67%, 70%, 72%, 75%, 77%, 80%, 82%, 85%, 87%, 90%, 92%, 95%, 97%, 98%, 99% identical to SEQ ID NO: 142, a polypeptide sequence which is at least 60%, 62%, 65%, 67%, 70%, 72%, 75%, 77%, 80%, 82%, 85%, 87%, 90%, 92%, 95%, 97%, 98%, 99% identical to SEQ ID NO: 146, a polypeptide sequence which is at least 60%, 62%, 65%, 67%, 70%, 72%, 75%, 77%, 80%, 82%, 85%, 87%, 90%, 92%, 95%, 97%, 98%, 99% identical to SEQ ID NO: 150, a polypeptide sequence which is at least 60%, 62%, 65%, 67%, 70%, 72%, 75%, 77%, 80%, 82%, 85%, 87%, 90%, 92%, 95%, 97%, 98%, 99% identical to SEQ ID NO: 154, a polypeptide sequence which is at least 60%, 62%, 65%, 67%, 70%, 72%, 75%, 77%, 80%, 82%, 85%, 87%, 90%, 92%, 95%, 97%, 98%, 99% identical to SEQ ID NO: 158, a polypeptide sequence which is at least 60%, 62%, 65%, 67%, 70%, 72%, 75%, 77%, 80%, 82%, 85%, 87%, 90%, 92%, 95%, 97%, 98%, 99% identical to SEQ ID NO: 162, a polypeptide sequence which is at least 60%, 62%, 65%, 67%, 70%, 72%, 75%, 77%, 80%, 82%, 85%, 87%, 90%, 92%, 95%, 97%, 98%, 99% identical to SEQ ID NO: 166, a polypeptide sequence which is at least 60%, 62%, 65%, 67%, 70%, 72%, 75%, 77%, 80%, 82%, 85%, 87%, 90%, 92%, 95%, 97%, 98%, 99% identical to SEQ ID NO: 170, a polypeptide sequence which is at least 60%, 62%, 65%, 67%, 70%, 72%, 75%, 77%, 80%, 82%, 85%, 87%, 90%, 92%, 95%, 97%, 98%, 99% identical to SEQ ID NO: 174, a polypeptide sequence which is at least 60%, 62%, 65%, 67%, 70%, 72%, 75%, 77%, 80%, 82%, 85%, 87%, 90%, 92%, 95%, 97%, 98%, 99% identical to SEQ ID NO: 178, a polypeptide sequence which is at least 60%, 62%, 65%, 67%, 70%, 72%, 75%, 77%, 80%, 82%, 85%, 87%, 90%, 92%, 95%, 97%, 98%, 99% identical to SEQ ID NO: 182, or a polypeptide sequence which is at least 60%, 62%, 65%, 67%, 70%, 72%, 75%, 77%, 80%, 82%, 85%, 87%, 90%, 92%, 95%, 97%, 98%, 99% identical to SEQ ID NO: 186.

[0344] In some embodiments, the variable domain of the first heavy chain comprises a polypeptide sequence which is at least 60%, 62%, 65%, 67%, 70%, 72%, 75%, 77%, 80%, 82%, 85%, 87%, 90%, 92%, 95%, 97%, 98%, 99% identical to SEQ ID NO: 15, a polypeptide sequence which is at least 60%, 62%, 65%, 67%, 70%, 72%, 75%, 77%, 80%, 82%, 85%, 87%, 90%, 92%, 95%, 97%, 98%, 99% identical to SEQ ID NO: 27, a polypeptide sequence which is at least 60%, 62%, 65%, 67%, 70%, 72%, 75%, 77%, 80%, 82%, 85%, 87%, 90%, 92%, 95%, 97%, 98%, 99% identical to SEQ ID NO: 35, a polypeptide sequence which is at least 60%, 62%, 65%, 67%, 70%, 72%, 75%, 77%, 80%, 82%, 85%, 87%, 90%, 92%, 95%, 97%, 98%, 99% identical to SEQ ID NO: 25, a polypeptide sequence which is at least 60%, 62%, 65%, 67%, 70%, 72%, 75%, 77%, 80%, 82%, 85%, 87%, 90%, 92%, 95%, 97%, 98%, 99% identical to SEQ ID NO: 17, a polypeptide sequence which is at least 60%, 62%, 65%, 67%, 70%, 72%, 75%, 77%, 80%, 82%, 85%, 87%, 90%, 92%, 95%, 97%, 98%, 99% identical to SEQ ID NO: 37, a polypeptide sequence which is at least 60%, 62%, 65%, 67%, 70%, 72%, 75%, 77%, 80%, 82%, 85%, 87%, 90%, 92%, 95%, 97%, 98%, 99% identical to SEQ ID NO: 19, a polypeptide sequence which is at least 60%, 62%, 65%, 67%, 70%, 72%, 75%, 77%, 80%, 82%, 85%, 87%, 90%, 92%, 95%, 97%, 98%, 99% identical to SEQ ID NO: 13, a polypeptide sequence which is at least 60%, 62%, 65%, 67%, 70%, 72%, 75%, 77%, 80%, 82%, 85%, 87%, 90%, 92%, 95%, 97%, 98%, 99% identical to SEQ ID NO: 5, a polypeptide sequence which is at least 60%, 62%, 65%, 67%, 70%, 72%, 75%, 77%, 80%, 82%, 85%, 87%, 90%, 92%, 95%, 97%, 98%, 99% identical to SEQ ID NO: 21, or a polypeptide sequence which is at least 60%, 62%, 65%, 67%, 70%, 72%, 75%, 77%, 80%, 82%, 85%, 87%, 90%, 92%, 95%, 97%, 98%, 99% identical to SEQ ID NO: 41.

[0345] In some embodiments, the variable domain of the first light chain comprises a polypeptide sequence which is at least 60%, 62%, 65%, 67%, 70%, 72%, 75%, 77%, 80%, 82%, 85%, 87%, 90%, 92%, 95%, 97%, 98%, 99% identical to SEQ ID NO: 16, a polypeptide sequence which is at least 60%, 62%, 65%, 67%, 70%, 72%, 75%, 77%, 80%, 82%, 85%, 87%, 90%, 92%, 95%, 97%, 98%, 99% identical to SEQ ID NO: 28, a polypeptide sequence which is at least 60%, 62%, 65%, 67%, 70%, 72%, 75%, 77%, 80%, 82%, 85%, 87%, 90%, 92%, 95%, 97%, 98%, 99% identical to SEQ ID NO: 36, a polypeptide sequence which is at least 60%, 62%, 65%, 67%, 70%, 72%, 75%, 77%, 80%, 82%, 85%, 87%, 90%, 92%, 95%, 97%, 98%, 99% identical to SEQ ID NO: 26, a polypeptide sequence which is at least 60%, 62%, 65%, 67%, 70%, 72%, 75%, 77%, 80%, 82%, 85%, 87%, 90%, 92%, 95%, 97%, 98%, 99% identical to SEQ ID NO: 18, a polypeptide sequence which is at least 60%, 62%, 65%, 67%, 70%, 72%, 75%, 77%, 80%, 82%, 85%, 87%, 90%, 92%, 95%, 97%, 98%, 99% identical to SEQ ID NO: 38, a polypeptide sequence which is at least 60%, 62%, 65%, 67%, 70%, 72%, 75%, 77%, 80%, 82%, 85%, 87%, 90%, 92%, 95%, 97%, 98%, 99% identical to SEQ ID NO: 20, a polypeptide sequence which is at least 60%, 62%, 65%, 67%, 70%, 72%, 75%, 77%, 80%, 82%, 85%, 87%, 90%, 92%, 95%, 97%, 98%, 99% identical to SEQ ID NO: 14, a polypeptide sequence which is at least 60%, 62%, 65%, 67%, 70%, 72%, 75%, 77%, 80%, 82%, 85%, 87%, 90%, 92%, 95%, 97%, 98%, 99% identical to SEQ ID NO: 6, a polypeptide sequence which is at least 60%, 62%, 65%, 67%, 70%, 72%, 75%, 77%, 80%, 82%, 85%, 87%, 90%, 92%, 95%, 97%, 98%, 99% identical to SEQ ID NO: 22, or a polypeptide sequence which is at least 60%, 62%, 65%, 67%, 70%, 72%, 75%, 77%, 80%, 82%, 85%, 87%, 90%, 92%, 95%, 97%, 98%, 99% identical to SEQ ID NO: 42.

[0346] In some embodiments, the variable domain of the second heavy chain comprises a polypeptide sequence which is at least 60%, 62%, 65%, 67%, 70%, 72%, 75%, 77%, 80%, 82%, 85%, 87%, 90%, 92%, 95%, 97%, 98%, 99% identical to SEQ ID NO: 27, a polypeptide sequence which is at least 60%, 62%, 65%, 67%, 70%, 72%, 75%, 77%, 80%, 82%, 85%, 87%, 90%, 92%, 95%, 97%, 98%, 99% identical to SEQ ID NO: 15, a polypeptide sequence which is at least 60%, 62%, 65%, 67%, 70%, 72%, 75%, 77%, 80%, 82%, 85%, 87%, 90%, 92%, 95%, 97%, 98%, 99% identical to SEQ ID NO: 5, a polypeptide sequence which is at least 60%, 62%, 65%, 67%, 70%, 72%, 75%, 77%, 80%, 82%, 85%, 87%, 90%, 92%, 95%, 97%, 98%, 99% identical to SEQ ID NO: 19, a polypeptide sequence which is at least 60%, 62%, 65%, 67%, 70%, 72%, 75%, 77%, 80%, 82%, 85%, 87%, 90%, 92%, 95%, 97%, 98%, 99% identical to SEQ ID NO: 21, a polypeptide sequence which is at least 60%, 62%, 65%, 67%, 70%, 72%, 75%, 77%, 80%, 82%, 85%, 87%, 90%, 92%, 95%, 97%, 98%, 99% identical to SEQ ID NO: 15, a polypeptide sequence which is at least 60%, 62%, 65%, 67%, 70%, 72%, 75%, 77%, 80%, 82%, 85%, 87%, 90%, 92%, 95%, 97%, 98%, 99% identical to SEQ ID NO: 29, a polypeptide sequence which is at least 60%, 62%, 65%, 67%, 70%, 72%, 75%, 77%, 80%, 82%, 85%, 87%, 90%, 92%, 95%, 97%, 98%, 99% identical to SEQ ID NO: 35, a polypeptide sequence which is at least 60%, 62%, 65%, 67%, 70%, 72%, 75%, 77%, 80%, 82%, 85%, 87%, 90%, 92%, 95%, 97%, 98%, 99% identical to SEQ ID NO: 23, a polypeptide sequence which is at least 60%, 62%, 65%, 67%, 70%, 72%, 75%, 77%, 80%, 82%, 85%, 87%, 90%, 92%, 95%, 97%, 98%, 99% identical to SEQ ID NO: 25, a polypeptide sequence which is at least 60%, 62%, 65%, 67%, 70%, 72%, 75%, 77%, 80%, 82%, 85%, 87%, 90%, 92%, 95%, 97%, 98%, 99% identical to SEQ ID NO: 37, a polypeptide sequence which is at least 60%, 62%, 65%, 67%, 70%, 72%, 75%, 77%, 80%, 82%, 85%, 87%, 90%, 92%, 95%, 97%, 98%, 99% identical to SEQ ID NO: 39, a polypeptide sequence which is at least 60%, 62%, 65%, 67%, 70%, 72%, 75%, 77%, 80%, 82%, 85%, 87%, 90%, 92%, 95%, 97%, 98%, 99% identical to SEQ ID NO: 43, or a polypeptide sequence which is at least 60%, 62%, 65%, 67%, 70%, 72%, 75%, 77%, 80%, 82%, 85%, 87%, 90%, 92%, 95%, 97%, 98%, 99% identical to SEQ ID NO: 9.

[0347] In some embodiments, variable domain of the second light chain comprises a polypeptide sequence which is at least 60%, 62%, 65%, 67%, 70%, 72%, 75%, 77%, 80%, 82%, 85%, 87%, 90%, 92%, 95%, 97%, 98%, 99% identical to SEQ ID NO: 28, a polypeptide sequence which is at least 60%, 62%, 65%, 67%, 70%, 72%, 75%, 77%, 80%, 82%, 85%, 87%, 90%, 92%, 95%, 97%, 98%, 99% identical to SEQ ID NO: 16, a polypeptide sequence which is at least 60%, 62%, 65%, 67%, 70%, 72%, 75%, 77%, 80%, 82%, 85%, 87%, 90%, 92%, 95%, 97%, 98%, 99% identical to SEQ ID NO: 6, a polypeptide sequence which is at least 60%, 62%, 65%, 67%, 70%, 72%, 75%, 77%, 80%, 82%, 85%, 87%, 90%, 92%, 95%, 97%, 98%, 99% identical to SEQ ID NO: 20, a polypeptide sequence which is at least 60%, 62%, 65%, 67%, 70%, 72%, 75%, 77%, 80%, 82%, 85%, 87%, 90%, 92%, 95%, 97%, 98%, 99% identical to SEQ ID NO: 22, a polypeptide sequence which is at least 60%, 62%, 65%, 67%, 70%, 72%, 75%, 77%, 80%, 82%, 85%, 87%, 90%, 92%, 95%, 97%, 98%, 99% identical to SEQ ID NO: 16, a polypeptide sequence which is at least 60%, 62%, 65%, 67%, 70%, 72%, 75%, 77%, 80%, 82%, 85%, 87%, 90%, 92%, 95%, 97%, 98%, 99% identical to SEQ ID NO: 30, a polypeptide sequence which is at least 60%, 62%, 65%, 67%, 70%, 72%, 75%, 77%, 80%, 82%, 85%, 87%, 90%, 92%, 95%, 97%, 98%, 99% identical to SEQ ID NO: 36, a polypeptide sequence which is at least 60%, 62%, 65%, 67%, 70%, 72%, 75%, 77%, 80%, 82%, 85%, 87%, 90%, 92%, 95%, 97%, 98%, 99% identical to SEQ ID NO: 24, a polypeptide sequence which is at least 60%, 62%, 65%, 67%, 70%, 72%, 75%, 77%, 80%, 82%, 85%, 87%, 90%, 92%, 95%, 97%, 98%, 99% identical to SEQ ID NO: 26, a polypeptide sequence which is at least 60%, 62%, 65%, 67%, 70%, 72%, 75%, 77%, 80%, 82%, 85%, 87%, 90%, 92%, 95%, 97%, 98%, 99% identical to SEQ ID NO: 38, a polypeptide sequence which is at least 60%, 62%, 65%, 67%, 70%, 72%, 75%, 77%, 80%, 82%, 85%, 87%, 90%, 92%, 95%, 97%, 98%, 99% identical to SEQ ID NO: 40, a polypeptide sequence which is at least 60%, 62%, 65%, 67%, 70%, 72%, 75%, 77%, 80%, 82%, 85%, 87%, 90%, 92%, 95%, 97%, 98%, 99% identical to SEQ ID NO: 44, or a polypeptide sequence which is at least 60%, 62%, 65%, 67%, 70%, 72%, 75%, 77%, 80%, 82%, 85%, 87%, 90%, 92%, 95%, 97%, 98%, 99% identical to SEQ ID NO: 10.

[0348] In some embodiments, the variable domain of the first heavy chain comprises the CDR1, CDR2, and CDR3 of SEQ ID NO: 51; the CDR1, CDR2, and CDR3 of SEQ ID NO: 55; the CDR1, CDR2, and CDR3 of SEQ ID NO: 67; the CDR1, CDR2, and CDR3 of SEQ ID NO: 71; the CDR1, CDR2, and CDR3 of SEQ ID NO: 75; the CDR1, CDR2, and CDR3 of SEQ ID NO: 79; the CDR1, CDR2, and CDR3 of SEQ ID NO: 83; the CDR1, CDR2, and CDR3 of SEQ ID NO: 87; the CDR1, CDR2, and CDR3 of SEQ ID NO: 91; the CDR1, CDR2, and CDR3 of SEQ ID NO: 95; the CDR1, CDR2, and CDR3 of SEQ ID NO: 99; the CDR1, CDR2, and CDR3 of SEQ ID NO: 103; the CDR1, CDR2, and CDR3 of SEQ ID NO: 107; the CDR1, CDR2, and CDR3 of SEQ ID NO: 115; the CDR1, CDR2, and CDR3 of SEQ ID NO: 119, the CDR1, CDR2, and CDR3 of SEQ ID NO: 123, the CDR1, CDR2, and CDR3 of SEQ ID NO: 127; the CDR1, CDR2, and CDR3 of SEQ ID NO: 131; the CDR1, CDR2, and CDR3 of SEQ ID NO: 139; the CDR1, CDR2, and CDR3 of SEQ ID NO: 143; the CDR1, CDR2, and CDR3 of SEQ ID NO: 147; the CDR1, CDR2, and CDR3 of SEQ ID NO: 151; the CDR1, CDR2, and CDR3 of SEQ ID NO: 155; the CDR1, CDR2, and CDR3 of SEQ ID NO: 159; the CDR1, CDR2, and CDR3 of SEQ ID NO: 163; the CDR1, CDR2, and CDR3 of SEQ ID NO: 167, the CDR1, CDR2, and CDR3 of SEQ ID NO: 171, the CDR1, CDR2, and CDR3 of SEQ ID NO: 175, the CDR1, CDR2, and CDR3 of SEQ ID NO: 179, or the CDR1, CDR2, and CDR3 of SEQ ID NO: 183.

[0349] In some embodiments, the variable domain of the first light chain comprises the CDR1, CDR2, and CDR3 of SEQ ID NO: 52; the CDR1, CDR2, and CDR3 of SEQ ID NO: 56; the CDR1, CDR2, and CDR3 of SEQ ID NO: 68; the CDR1, CDR2, and CDR3 of SEQ ID NO: 72; the CDR1, CDR2, and CDR3 of SEQ ID NO: 76; the CDR1, CDR2, and CDR3 of SEQ ID NO: 80; the CDR1, CDR2, and CDR3 of SEQ ID NO: 84; the CDR1, CDR2, and CDR3 of SEQ ID NO: 88; the CDR1, CDR2, and CDR3 of SEQ ID NO: 92; the CDR1, CDR2, and CDR3 of SEQ ID NO: 96; the CDR1, CDR2, and CDR3 of SEQ ID NO: 100; the CDR1, CDR2, and CDR3 of SEQ ID NO: 104; the CDR1, CDR2, and CDR3 of SEQ ID NO: 108; the CDR1, CDR2, and CDR3 of SEQ ID NO: 116; the CDR1, CDR2, and CDR3 of SEQ ID NO: 120; the CDR1, CDR2, and CDR3 of SEQ ID NO: 124; the CDR1, CDR2, and CDR3 of SEQ ID NO: 128; the CDR1, CDR2, and CDR3 of SEQ ID NO: 132; the CDR1, CDR2, and CDR3 of SEQ ID NO: 140; the CDR1, CDR2, and CDR3 of SEQ ID NO: 144; the CDR1, CDR2, and CDR3 of SEQ ID NO: 148; the CDR1, CDR2, and CDR3 of SEQ ID NO: 152; the CDR1, CDR2, and CDR3 of SEQ ID NO: 156; the CDR1, CDR2, and CDR3 of SEQ ID NO: 160; the CDR1, CDR2, and CDR3 of SEQ ID NO: 164; the CDR1, CDR2, and CDR3 of SEQ ID NO: 168, the CDR1, CDR2, and CDR3 of SEQ ID NO: 172, the CDR1, CDR2, and CDR3 of SEQ ID NO: 176, the CDR1, CDR2, and CDR3 of SEQ ID NO: 180, or the CDR1, CDR2, and CDR3 of SEQ ID NO: 184.

[0350] In some embodiments, the variable domain of the second heavy chain comprises the CDR1, CDR2, and CDR3 of SEQ ID NO: 53; the CDR1, CDR2, and CDR3 of SEQ ID NO: 57; the CDR1, CDR2, and CDR3 of SEQ ID NO: 69; the CDR1, CDR2, and CDR3 of SEQ ID NO: 73; the CDR1, CDR2, and CDR3 of SEQ ID NO: 77; the CDR1, CDR2, and CDR3 of SEQ ID NO: 81; the CDR1, CDR2, and CDR3 of SEQ ID NO: 85; the CDR1, CDR2, and CDR3 of SEQ ID NO: 89; the CDR1, CDR2, and CDR3 of SEQ ID NO: 93; the CDR1, CDR2, and CDR3 of SEQ ID NO: 97; the CDR1, CDR2, and CDR3 of SEQ ID NO: 101; the CDR1, CDR2, and CDR3 of SEQ ID NO: 105; the CDR1, CDR2, and CDR3 of SEQ ID NO: 109; the CDR1, CDR2, and CDR3 of SEQ ID NO: 117; the CDR1, CDR2, and CDR3 of SEQ ID NO: 121; the CDR1, CDR2, and CDR3 of SEQ ID NO: 125; the CDR1, CDR2, and CDR3 of SEQ ID NO: 129; the CDR1, CDR2, and CDR3 of SEQ ID NO: 133; the CDR1, CDR2, and CDR3 of SEQ ID NO: 141; the CDR1, CDR2, and CDR3 of SEQ ID NO: 145; the CDR1, CDR2, and CDR3 of SEQ ID NO: 149; the CDR1, CDR2, and CDR3 of SEQ ID NO: 153; the CDR1, CDR2, and CDR3 of SEQ ID NO: 157; the CDR1, CDR2, and CDR3 of SEQ ID NO: 161; the CDR1, CDR2, and CDR3 of SEQ ID NO: 165; the CDR1, CDR2, and CDR3 of SEQ ID NO: 169, the CDR1, CDR2, and CDR3 of SEQ ID NO: 173, the CDR1, CDR2, and CDR3 of SEQ ID NO: 177, the CDR1, CDR2, and CDR3 of SEQ ID NO: 181, or the CDR1, CDR2, and CDR3 of SEQ ID NO: 185.

[0351] In some embodiments, the variable domain of the second light chain comprises the CDR1, CDR2, and CDR3 of SEQ ID NO: 54; the CDR1, CDR2, and CDR3 of SEQ ID NO: 58; the CDR1, CDR2, and CDR3 of SEQ ID NO: 70; the CDR1, CDR2, and CDR3 of SEQ ID NO: 74; the CDR1, CDR2, and CDR3 of SEQ ID NO: 78; the CDR1, CDR2, and CDR3 of SEQ ID NO: 82; the CDR1, CDR2, and CDR3 of SEQ ID NO: 86; the CDR1, CDR2, and CDR3 of SEQ ID NO: 90; the CDR1, CDR2, and CDR3 of SEQ ID NO: 94; the CDR1, CDR2, and CDR3 of SEQ ID NO: 98; the CDR1, CDR2, and CDR3 of SEQ ID NO: 102; the CDR1, CDR2, and CDR3 of SEQ ID NO: 106; the CDR1, CDR2, and CDR3 of SEQ ID NO: 110; the CDR1, CDR2, and CDR3 of SEQ ID NO: 118; the CDR1, CDR2, and CDR3 of SEQ ID NO: 122; the CDR1, CDR2, and CDR3 of SEQ ID NO: 126; the CDR1, CDR2, and CDR3 of SEQ ID NO: 130; the CDR1, CDR2, and CDR3 of SEQ ID NO: 134; the CDR1, CDR2, and CDR3 of SEQ ID NO: 142; the CDR1, CDR2, and CDR3 of SEQ ID NO: 146; the CDR1, CDR2, and CDR3 of SEQ ID NO: 150; the CDR1, CDR2, and CDR3 of SEQ ID NO: 154; the CDR1, CDR2, and CDR3 of SEQ ID NO: 158; the CDR1, CDR2, and CDR3 of SEQ ID NO: 162, the CDR1, CDR2, and CDR3 of SEQ ID NO: 166; the CDR1, CDR2, and CDR3 of SEQ ID NO: 170, the CDR1, CDR2, and CDR3 of SEQ ID NO: 174, the CDR1, CDR2, and CDR3 of SEQ ID NO: 178, the CDR1, CDR2, and CDR3 of SEQ ID NO: 182, or the CDR1, CDR2, and CDR3 of SEQ ID NO: 186.

[0352] In some embodiments, the molecule comprises SEQ ID NO: 51, SEQ ID NO: 52, SEQ ID NO: 53, and SEQ ID NO: 54. In some embodiments, the molecule comprises SEQ ID NO: 55, SEQ ID NO: 56, SEQ ID NO: 57, and SEQ ID NO: 58. In some embodiments, the molecule comprises SEQ ID NO: 67, SEQ ID NO: 68, SEQ ID NO: 69, and SEQ ID NO: 70. In some embodiments, the molecule comprises SEQ ID NO: 71, SEQ ID NO: 72, SEQ ID NO: 73, and SEQ ID NO: 74. In some embodiments, the molecule comprises SEQ ID NO: 75, SEQ ID NO: 76, SEQ ID NO: 77, and SEQ ID NO: 78. In some embodiments, the molecule comprises SEQ ID NO: 79, SEQ ID NO: 80, SEQ ID NO: 81, and SEQ ID NO: 82. In some embodiments, the molecule comprises SEQ ID NO: 83, SEQ ID NO: 84, SEQ ID NO: 85, and SEQ ID NO: 86. In some embodiments, the molecule comprises SEQ ID NO: 87, SEQ ID NO: 88, SEQ ID NO: 89, and SEQ ID NO: 90. In some embodiments, the molecule comprises SEQ ID NO: 91, SEQ ID NO: 92, SEQ ID NO: 93, and SEQ ID NO: 94. In some embodiments, the molecule comprises SEQ ID NO: 95, SEQ ID NO: 96, SEQ ID NO: 97, and SEQ ID NO: 98. In some embodiments, the molecule comprises SEQ ID NO: 99, SEQ ID NO: 100, SEQ ID NO: 101, and SEQ ID NO: 102. In some embodiments, the molecule comprises SEQ ID NO: 103, SEQ ID NO: 104, SEQ ID NO: 105, and SEQ ID NO: 106. In some embodiments, the molecule comprises SEQ ID NO: 107, SEQ ID NO: 108, SEQ ID NO: 109, and SEQ ID NO: 110. In some embodiments, the molecule comprises SEQ ID NO: 115, SEQ ID NO: 116, SEQ ID NO: 117, and SEQ ID NO: 118.

[0353] In some embodiments, the molecule comprises SEQ ID NO: 119, SEQ ID NO: 120, SEQ ID NO: 121, and SEQ ID NO: 122. In some embodiments, the molecule comprises SEQ ID NO: 123, SEQ ID NO: 124, SEQ ID NO: 125, and SEQ ID NO: 126. In some embodiments, the molecule comprises SEQ ID NO: 127, SEQ ID NO: 128, SEQ ID NO: 129, and SEQ ID NO: 130. In some embodiments, the molecule comprises SEQ ID NO: 131, SEQ ID NO: 132, SEQ ID NO: 133, and SEQ ID NO: 133. In some embodiments, the molecule comprises SEQ ID NO: 139, SEQ ID NO: 140, SEQ ID NO: 141, and SEQ ID NO: 142. In some embodiments, the molecule comprises SEQ ID NO: 143, SEQ ID NO: 144, SEQ ID NO: 145, and SEQ ID NO: 146. In some embodiments, the molecule comprises SEQ ID NO: 147, SEQ ID NO: 148, SEQ ID NO: 149, and SEQ ID NO: 150. In some embodiments, the molecule comprises SEQ ID NO: 151, SEQ ID NO: 152, SEQ ID NO: 153, and SEQ ID NO: 154. In some embodiments, the molecule comprises SEQ ID NO: 155, SEQ ID NO: 156, SEQ ID NO: 157, and SEQ ID NO: 158. In some embodiments, the molecule comprises SEQ ID NO: 159, SEQ ID NO: 160, SEQ ID NO: 161, and SEQ ID NO: 162. In some embodiments, the molecule comprises SEQ ID NO: 163, SEQ ID NO: 164, SEQ ID NO: 165, and SEQ ID NO: 166. In some embodiments, the molecule comprises SEQ ID NO: 167, SEQ ID NO: 168, SEQ ID NO: 169, and SEQ ID NO: 170. In some embodiments, the molecule comprises SEQ ID NO: 171, SEQ ID NO: 172, SEQ ID NO: 173, and SEQ ID NO: 174. In some embodiments, the molecule comprises SEQ ID NO: 175, SEQ ID NO: 176, SEQ ID NO: 177, and SEQ ID NO: 178. In some embodiments, the molecule comprises SEQ ID NO: 179, SEQ ID NO: 180, SEQ ID NO: 181, and SEQ ID NO: 182. In some embodiments, the molecule comprises SEQ ID NO: 183, SEQ ID NO: 184, SEQ ID NO: 185, and SEQ ID NO: 186.

[0354] In some embodiments, the molecule further comprises one or more disulfide bonds. In some embodiments, the molecule further comprises one or more linker sequences. In some embodiments, the molecule is capable of neutralizing a coronavirus. In some embodiments, the coronavirus is a SARS-CoV-2 virus. In some embodiments, the SARS-CoV-2 virus strain is selected from the group consisting of WA1, B.1.1.7, B1.526, B1.351, P1, B1.352, and B.1.427. In some embodiments, the molecule specifically recognizes a first epitope and a second epitope on a SARS-CoV-2 particle. In some embodiments, the first epitope comprises at least a portion of a receptor binding domain (RBD) on a spike protein of a SARS-CoV-2 particle. In some embodiments, the second epitope comprises at least a portion of a N-terminal domain (NTD) on a spike protein of a SARS-CoV-2 particle. In some embodiments, the composition is administered in combination with a second therapeutic agent.

[0355] In certain aspects, the invention provides a synthesized monoclonal antibody, or a functional fragment thereof, comprising a heavy chain having a variable domain and a constant domain and a light chain having a variable domain and a constant domain, wherein the antibody binds an antigen on a coronavirus particle.

[0356] In some embodiments, the heavy chain variable domain comprises a polypeptide sequence which is at least 60%, 62%, 65%, 67%, 70%, 72%, 75%, 77%, 80%, 82%, 85%, 87%, 90%, 92%, 95%, 97%, 98%, 99% identical to SEQ ID NO: 5. In some embodiments, the heavy chain variable domain comprises a polypeptide sequence which is at least 60%, 62%, 65%, 67%, 70%, 72%, 75%, 77%, 80%, 82%, 85%, 87%, 90%, 92%, 95%, 97%, 98%, 99% identical to SEQ ID NO: 41. In some embodiments, the heavy chain variable domain comprises a polypeptide sequence which is at least 60%, 62%, 65%, 67%, 70%, 72%, 75%, 77%, 80%, 82%, 85%, 87%, 90%, 92%, 95%, 97%, 98%, 99% identical to SEQ ID NO: 35. In some embodiments, the heavy chain variable domain comprises a polypeptide sequence which is at least 60%, 62%, 65%, 67%, 70%, 72%, 75%, 77%, 80%, 82%, 85%, 87%, 90%, 92%, 95%, 97%, 98%, 99% identical to SEQ ID NO: 1. In some embodiments, the heavy chain variable domain comprises a polypeptide sequence which is at least 60%, 62%, 65%, 67%, 70%, 72%, 75%, 77%, 80%, 82%, 85%, 87%, 90%, 92%, 95%, 97%, 98%, 99% identical to SEQ ID NO: 23. In some embodiments, the heavy chain variable domain comprises a polypeptide sequence which is at least 60%, 62%, 65%, 67%, 70%, 72%, 75%, 77%, 80%, 82%, 85%, 87%, 90%, 92%, 95%, 97%, 98%, 99% identical to SEQ ID NO: 13.

[0357] In some embodiments, the heavy chain variable domain comprises a polypeptide sequence which is at least 60%, 62%, 65%, 67%, 70%, 72%, 75%, 77%, 80%, 82%, 85%, 87%, 90%, 92%, 95%, 97%, 98%, 99% identical to SEQ ID NO: 27. In some embodiments, the light chain variable domain comprises a polypeptide sequence which is at least 60%, 62%, 65%, 67%, 70%, 72%, 75%, 77%, 80%, 82%, 85%, 87%, 90%, 92%, 95%, 97%, 98%, 99% identical to SEQ ID NO: 6. In some embodiments, the light chain variable domain comprises a polypeptide sequence which is at least 60%, 62%, 65%, 67%, 70%, 72%, 75%, 77%, 80%, 82%, 85%, 87%, 90%, 92%, 95%, 97%, 98%, 99% identical to SEQ ID NO: 42. In some embodiments, the light chain variable domain comprises a polypeptide sequence which is at least 60%, 62%, 65%, 67%, 70%, 72%, 75%, 77%, 80%, 82%, 85%, 87%, 90%, 92%, 95%, 97%, 98%, 99% identical to SEQ ID NO: 36. In some embodiments, the light chain variable domain comprises a polypeptide sequence which is at least 60%, 62%, 65%, 67%, 70%, 72%, 75%, 77%, 80%, 82%, 85%, 87%, 90%, 92%, 95%, 97%, 98%, 99% identical to SEQ ID NO: 2.

[0358] In some embodiments, the light chain variable domain comprises a polypeptide sequence which is at least 60%, 62%, 65%, 67%, 70%, 72%, 75%, 77%, 80%, 82%, 85%, 87%, 90%, 92%, 95%, 97%, 98%, 99% identical to SEQ ID NO: 24. In some embodiments, the light chain variable domain comprises a polypeptide sequence which is at least 60%, 62%, 65%, 67%, 70%, 72%, 75%, 77%, 80%, 82%, 85%, 87%, 90%, 92%, 95%, 97%, 98%, 99% identical to SEQ ID NO: 14. In some embodiments, the light chain variable domain comprises a polypeptide sequence which is at least 60%, 62%, 65%, 67%, 70%, 72%, 75%, 77%, 80%, 82%, 85%, 87%, 90%, 92%, 95%, 97%, 98%, 99% identical to SEQ ID NO: 28. In some embodiments, the heavy chain variable domain comprises a polypeptide sequence which is at least 60%, 62%, 65%, 67%, 70%, 72%, 75%, 77%, 80%, 82%, 85%, 87%, 90%, 92%, 95%, 97%, 98%, 99% identical to SEQ ID NO: 5 and the light chain variable domain comprises a polypeptide sequence which is at least 60%, 62%, 65%, 67%, 70%, 72%, 75%, 77%, 80%, 82%, 85%, 87%, 90%, 92%, 95%, 97%, 98%, 99% identical to SEQ ID NO: 6. In some embodiments, the heavy chain variable domain comprises a polypeptide sequence which is at least 60%, 62%, 65%, 67%, 70%, 72%, 75%, 77%, 80%, 82%, 85%, 87%, 90%, 92%, 95%, 97%, 98%, 99% identical to SEQ ID NO: 41 and the light chain variable domain comprises a polypeptide sequence which is at least 60%, 62%, 65%, 67%, 70%, 72%, 75%, 77%, 80%, 82%, 85%, 87%, 90%, 92%, 95%, 97%, 98%, 99% identical to SEQ ID NO: 42. In some embodiments, the heavy chain variable domain comprises a polypeptide sequence which is at least 60%, 62%, 65%, 67%, 70%, 72%, 75%, 77%, 80%, 82%, 85%, 87%, 90%, 92%, 95%, 97%, 98%, 99% identical to SEQ ID NO: 35 and the light chain variable domain comprises a polypeptide sequence which is at least 60%, 62%, 65%, 67%, 70%, 72%, 75%, 77%, 80%, 82%, 85%, 87%, 90%, 92%, 95%, 97%, 98%, 99% identical to SEQ ID NO: 36.

[0359] In some embodiments, the heavy chain variable domain comprises a polypeptide sequence which is at least 60%, 62%, 65%, 67%, 70%, 72%, 75%, 77%, 80%, 82%, 85%, 87%, 90%, 92%, 95%, 97%, 98%, 99% identical to SEQ ID NO: 1 and the light chain variable domain comprises a polypeptide sequence which is at least 60%, 62%, 65%, 67%, 70%, 72%, 75%, 77%, 80%, 82%, 85%, 87%, 90%, 92%, 95%, 97%, 98%, 99% identical to SEQ ID NO: 2. In some embodiments, the heavy chain variable domain comprises a polypeptide sequence which is at least 60%, 62%, 65%, 67%, 70%, 72%, 75%, 77%, 80%, 82%, 85%, 87%, 90%, 92%, 95%, 97%, 98%, 99% identical to SEQ ID NO: 23 and the light chain variable domain comprises a polypeptide sequence which is at least 60%, 62%, 65%, 67%, 70%, 72%, 75%, 77%, 80%, 82%, 85%, 87%, 90%, 92%, 95%, 97%, 98%, 99% identical to SEQ ID NO: 24. In some embodiments, the heavy chain variable domain comprises a polypeptide sequence which is at least 60%, 62%, 65%, 67%, 70%, 72%, 75%, 77%, 80%, 82%, 85%, 87%, 90%, 92%, 95%, 97%, 98%, 99% identical to SEQ ID NO: 13 and the light chain variable domain comprises a polypeptide sequence which is at least 60%, 62%, 65%, 67%, 70%, 72%, 75%, 77%, 80%, 82%, 85%, 87%, 90%, 92%, 95%, 97%, 98%, 99% identical to SEQ ID NO: 14. In some embodiments, the heavy chain variable domain comprises a polypeptide sequence which is at least 60%, 62%, 65%, 67%, 70%, 72%, 75%, 77%, 80%, 82%, 85%, 87%, 90%, 92%, 95%, 97%, 98%, 99% identical to SEQ ID NO: 27 and the light chain variable domain comprises a polypeptide sequence which is at least 60%, 62%, 65%, 67%, 70%, 72%, 75%, 77%, 80%, 82%, 85%, 87%, 90%, 92%, 95%, 97%, 98%, 99% identical to SEQ ID NO: 28.

[0360] In some embodiments, the heavy chain variable domain comprises SEQ ID NO: 5 and the light chain variable domain comprises SEQ ID NO: 6. In some embodiments, the heavy chain variable domain comprises SEQ ID NO: 41 and the light chain variable domain comprises SEQ ID NO: 42. In some embodiments, the heavy chain variable domain comprises SEQ ID NO: 35 and the light chain variable domain comprises SEQ ID NO: 36. In some embodiments, the heavy chain variable domain comprises SEQ ID NO: 1 and the light chain variable domain comprises SEQ ID NO: 2. In some embodiments, the heavy chain variable domain comprises SEQ ID NO: 23 and the light chain variable domain comprises SEQ ID NO: 24. In some embodiments, the heavy chain variable domain comprises SEQ ID NO: 13 and the light chain variable domain comprises SEQ ID NO: 14. In some embodiments, the heavy chain variable domain comprises SEQ ID NO: 27 and the light chain variable domain comprises SEQ ID NO: 28. In some embodiments, the heavy chain variable domain comprises the CDR1, CDR2, and CDR3 regions of SEQ ID NO: 5. In some embodiments, the heavy chain variable domain comprises the CDR1, CDR2, and CDR3 regions of SEQ ID NO: 41. In some embodiments, the heavy chain variable domain comprises the CDR1, CDR2, and CDR3 regions of SEQ ID NO: 1.

[0361] In some embodiments, the heavy chain variable domain comprises the CDR1, CDR2, and CDR3 regions of SEQ ID NO: 23. In some embodiments, the heavy chain variable domain comprises the CDR1, CDR2, and CDR3 regions of SEQ ID NO: 13. In some embodiments, the heavy chain variable domain comprises the CDR1, CDR2, and CDR3 regions of SEQ ID NO: 27.

[0362] In some embodiments, the light chain variable domain comprises the CDR1, CDR2, and CDR3 regions of SEQ ID NO: 6. In some embodiments, the light chain variable domain comprises the CDR1, CDR2, and CDR3 regions of SEQ ID NO: 42. In some embodiments, the light chain variable domain comprises the CDR1, CDR2, and CDR3 regions of SEQ ID NO: 36. In some embodiments, the light chain variable domain comprises the CDR1, CDR2, and CDR3 regions of SEQ ID NO: 2. In some embodiments, the light chain variable domain comprises the CDR1, CDR2, and CDR3 regions of SEQ ID NO: 24. In some embodiments, the light chain variable domain comprises the CDR1, CDR2, and CDR3 regions of SEQ ID NO: 14. In some embodiments, the light chain variable domain comprises the CDR1, CDR2, and CDR3 regions of SEQ ID NO: 28. In some embodiments, the heavy chain variable domain comprises the CDR1, CDR2, and CDR3 regions of SEQ ID NO: 5 and the light chain variable domain comprises the CDR1, CDR2, and CDR3 regions of SEQ ID NO: 6. In some embodiments, the heavy chain variable domain comprises the CDR1, CDR2, and CDR3 regions of SEQ ID NO: 41 and the light chain variable domain comprises the CDR1, CDR2, and CDR3 regions of SEQ ID NO: 42. In some embodiments, the heavy chain variable domain comprises the CDR1, CDR2, and CDR3 regions of SEQ ID NO: 35 and the light chain variable domain comprises the CDR1, CDR2, and CDR3 regions of SEQ ID NO: 36. In some embodiments, the heavy chain variable domain comprises the CDR1, CDR2, and CDR3 regions of SEQ ID NO: 1 and the light chain variable domain comprises the CDR1, CDR2, and CDR3 regions of SEQ ID NO: 2.

[0363] In some embodiments, the heavy chain variable domain comprises the CDR1, CDR2, and CDR3 regions of SEQ ID NO: 23 and the light chain variable domain comprises the CDR1, CDR2, and CDR3 regions of SEQ ID NO: 24. In some embodiments, the heavy chain variable domain comprises the CDR1, CDR2, and CDR3 regions of SEQ ID NO: 13 and the light chain variable domain comprises the CDR1, CDR2, and CDR3 regions of SEQ ID NO: 14. In some embodiments, the heavy chain variable domain comprises the CDR1, CDR2, and CDR3 regions of SEQ ID NO: 27 and the light chain variable domain comprises the CDR1, CDR2, and CDR3 regions of SEQ ID NO: 28.

[0364] In some embodiments, the antibody neutralizes a coronavirus. In some embodiments, the coronavirus is a SARS-CoV-2 virus. In some embodiments, the coronavirus is a SARS-CoV-2 variant strain. In some embodiments, the variant strain is selected from the group consisting of WA1, B.1.1.7, B1.526, B1.351, P1, B1.352, and B.1.427. In some embodiments, the antibody specifically binds an epitope on the surface of the coronavirus. In some embodiments, the epitope comprises at least a portion of a coronavirus spike protein. In some embodiments, the at least a portion of a coronavirus spike protein comprises a receptor binding domain (RBD) of a spike protein. In some embodiments, the at least a portion of a coronavirus spike protein comprises a N-Terminal domain (NTD) of a spike protein. In some embodiments, the coronavirus is a SARS-CoV-2 coronavirus.

[0365] In certain aspects, the invention provides a method of treating or preventing a COVID-19 infection in a subject in need thereof, the method comprising administering to the subject a therapeutically effective amount of a synthesized monoclonal antibody, or a functional fragment thereof, comprising a heavy chain having a variable domain and a constant domain and a light chain having a variable domain and a constant domain, wherein the antibody binds an antigen on a coronavirus particle.

[0366] In some embodiments, the heavy chain variable domain comprises a polypeptide sequence which is at least 60%, 62%, 65%, 67%, 70%, 72%, 75%, 77%, 80%, 82%, 85%, 87%, 90%, 92%, 95%, 97%, 98%, 99% identical to SEQ ID NO: 5. In some embodiments, the heavy chain variable domain comprises a polypeptide sequence which is at least 60%, 62%, 65%, 67%, 70%, 72%, 75%, 77%, 80%, 82%, 85%, 87%, 90%, 92%, 95%, 97%, 98%, 99% identical to SEQ ID NO: 41. In some embodiments, the heavy chain variable domain comprises a polypeptide sequence which is at least 60%, 62%, 65%, 67%, 70%, 72%, 75%, 77%, 80%, 82%, 85%, 87%, 90%, 92%, 95%, 97%, 98%, 99% identical to SEQ ID NO: 35. In some embodiments, the heavy chain variable domain comprises a polypeptide sequence which is at least 60%, 62%, 65%, 67%, 70%, 72%, 75%, 77%, 80%, 82%, 85%, 87%, 90%, 92%, 95%, 97%, 98%, 99% identical to SEQ ID NO: 1. In some embodiments, the heavy chain variable domain comprises a polypeptide sequence which is at least 60%, 62%, 65%, 67%, 70%, 72%, 75%, 77%, 80%, 82%, 85%, 87%, 90%, 92%, 95%, 97%, 98%, 99% identical to SEQ ID NO: 23. In some embodiments, the heavy chain variable domain comprises a polypeptide sequence which is at least 60%, 62%, 65%, 67%, 70%, 72%, 75%, 77%, 80%, 82%, 85%, 87%, 90%, 92%, 95%, 97%, 98%, 99% identical to SEQ ID NO: 13.

[0367] In some embodiments, the heavy chain variable domain comprises a polypeptide sequence which is at least 60%, 62%, 65%, 67%, 70%, 72%, 75%, 77%, 80%, 82%, 85%, 87%, 90%, 92%, 95%, 97%, 98%, 99% identical to SEQ ID NO: 27. In some embodiments, the light chain variable domain comprises a polypeptide sequence which is at least 60%, 62%, 65%, 67%, 70%, 72%, 75%, 77%, 80%, 82%, 85%, 87%, 90%, 92%, 95%, 97%, 98%, 99% identical to SEQ ID NO: 6.

[0368] In some embodiments, the light chain variable domain comprises a polypeptide sequence which is at least 60%, 62%, 65%, 67%, 70%, 72%, 75%, 77%, 80%, 82%, 85%, 87%, 90%, 92%, 95%, 97%, 98%, 99% identical to SEQ ID NO: 42. In some embodiments, the light chain variable domain comprises a polypeptide sequence which is at least 60%, 62%, 65%, 67%, 70%, 72%, 75%, 77%, 80%, 82%, 85%, 87%, 90%, 92%, 95%, 97%, 98%, 99% identical to SEQ ID NO: 36. In some embodiments, the light chain variable domain comprises a polypeptide sequence which is at least 60%, 62%, 65%, 67%, 70%, 72%, 75%, 77%, 80%, 82%, 85%, 87%, 90%, 92%, 95%, 97%, 98%, 99% identical to SEQ ID NO: 2. In some embodiments, the light chain variable domain comprises a polypeptide sequence which is at least 60%, 62%, 65%, 67%, 70%, 72%, 75%, 77%, 80%, 82%, 85%, 87%, 90%, 92%, 95%, 97%, 98%, 99% identical to SEQ ID NO: 24. In some embodiments, the light chain variable domain comprises a polypeptide sequence which is at least 60%, 62%, 65%, 67%, 70%, 72%, 75%, 77%, 80%, 82%, 85%, 87%, 90%, 92%, 95%, 97%, 98%, 99% identical to SEQ ID NO: 14. In some embodiments, the light chain variable domain comprises a polypeptide sequence which is at least 60%, 62%, 65%, 67%, 70%, 72%, 75%, 77%, 80%, 82%, 85%, 87%, 90%, 92%, 95%, 97%, 98%, 99% identical to SEQ ID NO: 28.

[0369] In some embodiments, the heavy chain variable domain comprises a polypeptide sequence which is at least 60%, 62%, 65%, 67%, 70%, 72%, 75%, 77%, 80%, 82%, 85%, 87%, 90%, 92%, 95%, 97%, 98%, 99% identical to SEQ ID NO: 5 and the light chain variable domain comprises a polypeptide sequence which is at least 60%, 62%, 65%, 67%, 70%, 72%, 75%, 77%, 80%, 82%, 85%, 87%, 90%, 92%, 95%, 97%, 98%, 99% identical to SEQ ID NO: 6. In some embodiments, the heavy chain variable domain comprises a polypeptide sequence which is at least 60%, 62%, 65%, 67%, 70%, 72%, 75%, 77%, 80%, 82%, 85%, 87%, 90%, 92%, 95%, 97%, 98%, 99% identical to SEQ ID NO: 41 and the light chain variable domain comprises a polypeptide sequence which is at least 60%, 62%, 65%, 67%, 70%, 72%, 75%, 77%, 80%, 82%, 85%, 87%, 90%, 92%, 95%, 97%, 98%, 99% identical to SEQ ID NO: 42. In some embodiments, the heavy chain variable domain comprises a polypeptide sequence which is at least 60%, 62%, 65%, 67%, 70%, 72%, 75%, 77%, 80%, 82%, 85%, 87%, 90%, 92%, 95%, 97%, 98%, 99% identical to SEQ ID NO: 35 and the light chain variable domain comprises a polypeptide sequence which is at least 60%, 62%, 65%, 67%, 70%, 72%, 75%, 77%, 80%, 82%, 85%, 87%, 90%, 92%, 95%, 97%, 98%, 99% identical to SEQ ID NO: 36. In some embodiments, the heavy chain variable domain comprises a polypeptide sequence which is at least 60%, 62%, 65%, 67%, 70%, 72%, 75%, 77%, 80%, 82%, 85%, 87%, 90%, 92%, 95%, 97%, 98%, 99% identical to SEQ ID NO: 1 and the light chain variable domain comprises a polypeptide sequence which is at least 60%, 62%, 65%, 67%, 70%, 72%, 75%, 77%, 80%, 82%, 85%, 87%, 90%, 92%, 95%, 97%, 98%, 99% identical to SEQ ID NO: 2. In some embodiments, the heavy chain variable domain comprises a polypeptide sequence which is at least 60%, 62%, 65%, 67%, 70%, 72%, 75%, 77%, 80%, 82%, 85%, 87%, 90%, 92%, 95%, 97%, 98%, 99% identical to SEQ ID NO: 23 and the light chain variable domain comprises a polypeptide sequence which is at least 60%, 62%, 65%, 67%, 70%, 72%, 75%, 77%, 80%, 82%, 85%, 87%, 90%, 92%, 95%, 97%, 98%, 99% identical to SEQ ID NO: 24.

[0370] In some embodiments, the heavy chain variable domain comprises a polypeptide sequence which is at least 60%, 62%, 65%, 67%, 70%, 72%, 75%, 77%, 80%, 82%, 85%, 87%, 90%, 92%, 95%, 97%, 98%, 99% identical to SEQ ID NO: 13 and the light chain variable domain comprises a polypeptide sequence which is at least 60%, 62%, 65%, 67%, 70%, 72%, 75%, 77%, 80%, 82%, 85%, 87%, 90%, 92%, 95%, 97%, 98%, 99% identical to SEQ ID NO: 14. In some embodiments, the heavy chain variable domain comprises a polypeptide sequence which is at least 60%, 62%, 65%, 67%, 70%, 72%, 75%, 77%, 80%, 82%, 85%, 87%, 90%, 92%, 95%, 97%, 98%, 99% identical to SEQ ID NO: 27 and the light chain variable domain comprises a polypeptide sequence which is at least 60%, 62%, 65%, 67%, 70%, 72%, 75%, 77%, 80%, 82%, 85%, 87%, 90%, 92%, 95%, 97%, 98%, 99% identical to SEQ ID NO: 28.

[0371] In some embodiments, the heavy chain variable domain comprises SEQ ID NO: 5 and the light chain variable domain comprises SEQ ID NO: 6. In some embodiments, the heavy chain variable domain comprises SEQ ID NO: 41 and the light chain variable domain comprises SEQ ID NO: 42. In some embodiments, the heavy chain variable domain comprises SEQ ID NO: 35 and the light chain variable domain comprises SEQ ID NO: 36. In some embodiments, the heavy chain variable domain comprises SEQ ID NO: 1 and the light chain variable domain comprises SEQ ID NO: 2. In some embodiments, the heavy chain variable domain comprises SEQ ID NO: 23 and the light chain variable domain comprises SEQ ID NO: 24. In some embodiments, the heavy chain variable domain comprises SEQ ID NO: 13 and the light chain variable domain comprises SEQ ID NO: 14.

[0372] In some embodiments, the heavy chain variable domain comprises SEQ ID NO: 27 and the light chain variable domain comprises SEQ ID NO: 28. In some embodiments, the heavy chain variable domain comprises the CDR1, CDR2, and CDR3 regions of SEQ ID NO: 5. In some embodiments, the heavy chain variable domain comprises the CDR1, CDR2, and CDR3 regions of SEQ ID NO: 41. In some embodiments, the heavy chain variable domain comprises the CDR1, CDR2, and CDR3 regions of SEQ ID NO: 1. In some embodiments, the heavy chain variable domain comprises the CDR1, CDR2, and CDR3 regions of SEQ ID NO: 23. In some embodiments, the heavy chain variable domain comprises the CDR1, CDR2, and CDR3 regions of SEQ ID NO: 13. In some embodiments, the heavy chain variable domain comprises the CDR1, CDR2, and CDR3 regions of SEQ ID NO: 27. In some embodiments, the light chain variable domain comprises the CDR1, CDR2, and CDR3 regions of SEQ ID NO: 6. In some embodiments, the light chain variable domain comprises the CDR1, CDR2, and CDR3 regions of SEQ ID NO: 42. In some embodiments, the light chain variable domain comprises the CDR1, CDR2, and CDR3 regions of SEQ ID NO: 36. In some embodiments, the light chain variable domain comprises the CDR1, CDR2, and CDR3 regions of SEQ ID NO: 2. In some embodiments, the light chain variable domain comprises the CDR1, CDR2, and CDR3 regions of SEQ ID NO: 24.

[0373] In some embodiments, the light chain variable domain comprises the CDR1, CDR2, and CDR3 regions of SEQ ID NO: 14. In some embodiments, the light chain variable domain comprises the CDR1, CDR2, and CDR3 regions of SEQ ID NO: 28. In some embodiments, the heavy chain variable domain comprises the CDR1, CDR2, and CDR3 regions of SEQ ID NO: 5 and the light chain variable domain comprises the CDR1, CDR2, and CDR3 regions of SEQ ID NO: 6. In some embodiments, the heavy chain variable domain comprises the CDR1, CDR2, and CDR3 regions of SEQ ID NO: 41 and the light chain variable domain comprises the CDR1, CDR2, and CDR3 regions of SEQ ID NO: 42. In some embodiments, the heavy chain variable domain comprises the CDR1, CDR2, and CDR3 regions of SEQ ID NO: 35 and the light chain variable domain comprises the CDR1, CDR2, and CDR3 regions of SEQ ID NO: 36. In some embodiments, the heavy chain variable domain comprises the CDR1, CDR2, and CDR3 regions of SEQ ID NO: 1 and the light chain variable domain comprises the CDR1, CDR2, and CDR3 regions of SEQ ID NO: 2. In some embodiments, the heavy chain variable domain comprises the CDR1, CDR2, and CDR3 regions of SEQ ID NO: 23 and the light chain variable domain comprises the CDR1, CDR2, and CDR3 regions of SEQ ID NO: 24. In some embodiments, the heavy chain variable domain comprises the CDR1, CDR2, and CDR3 regions of SEQ ID NO: 13 and the light chain variable domain comprises the CDR1, CDR2, and CDR3 regions of SEQ ID NO: 14. In some embodiments, the heavy chain variable domain comprises the CDR1, CDR2, and CDR3 regions of SEQ ID NO: 27 and the light chain variable domain comprises the CDR1, CDR2, and CDR3 regions of SEQ ID NO: 28.

[0374] In some embodiments, the antibody neutralizes a coronavirus. In some embodiments, the coronavirus is a SARS-CoV-2 virus. In some embodiments, the coronavirus is a SARS-CoV-2 variant strain. In some embodiments, the variant strain is selected from the group consisting of WA1, B.1.1.7, B1.526, B1.351, P1, B1.352, and B.1.427. In some embodiments, the antibody specifically binds an epitope on the surface of the coronavirus. In some embodiments, the epitope comprises at least a portion of a coronavirus spike protein. In some embodiments, the at least a portion of a coronavirus spike protein comprises a receptor binding domain (RBD) of a spike protein. In some embodiments, the at least a portion of a coronavirus spike protein comprises a N-Terminal domain (NTD) of a spike protein. In some embodiments, the coronavirus is a SARS-CoV-2 coronavirus. In some embodiments, the antibody is administered in combination with a second pharmaceutical agent.

[0375] In certain aspects, the invention provides a bispecific molecule comprising a first polypeptide chain and a second polypeptide chain, wherein: the first polypeptide chain comprises: a first light chain comprising a variable domain and a constant domain; a first heavy chain comprising a variable domain and a constant domain; the second polypeptide chain comprises: a second light chain comprising a variable domain and a constant domain; and a second heavy chain comprising a variable domain and a constant domain. In some embodiments, the first polypeptide chain and the second polypeptide chain are covalently bonded to one another.

[0376] In some embodiments, the first heavy chain comprises a polypeptide sequence which is at least 60%, 62%, 65%, 67%, 70%, 72%, 75%, 77%, 80%, 82%, 85%, 87%, 90%, 92%, 95%, 97%, 98%, 99% identical to SEQ ID NO: 47, a polypeptide sequence which is at least 60%, 62%, 65%, 67%, 70%, 72%, 75%, 77%, 80%, 82%, 85%, 87%, 90%, 92%, 95%, 97%, 98%, 99% identical to SEQ ID NO: 111, a polypeptide sequence which is at least 60%, 62%, 65%, 67%, 70%, 72%, 75%, 77%, 80%, 82%, 85%, 87%, 90%, 92%, 95%, 97%, 98%, 99% identical to SEQ ID NO: 135, a polypeptide sequence which is at least 60%, 62%, 65%, 67%, 70%, 72%, 75%, 77%, 80%, 82%, 85%, 87%, 90%, 92%, 95%, 97%, 98%, 99% identical to SEQ ID NO: 187, or a polypeptide sequence which is at least 60%, 62%, 65%, 67%, 70%, 72%, 75%, 77%, 80%, 82%, 85%, 87%, 90%, 92%, 95%, 97%, 98%, 99% identical to SEQ ID NO: 211. In some embodiments, the first light chain comprises a polypeptide sequence which is at least 60%, 62%, 65%, 67%, 70%, 72%, 75%, 77%, 80%, 82%, 85%, 87%, 90%, 92%, 95%, 97%, 98%, 99% identical to SEQ ID NO: 48, a polypeptide sequence which is at least 60%, 62%, 65%, 67%, 70%, 72%, 75%, 77%, 80%, 82%, 85%, 87%, 90%, 92%, 95%, 97%, 98%, 99% identical to SEQ ID NO: 112, a polypeptide sequence which is at least 60%, 62%, 65%, 67%, 70%, 72%, 75%, 77%, 80%, 82%, 85%, 87%, 90%, 92%, 95%, 97%, 98%, 99% identical to SEQ ID NO: 136, a polypeptide sequence which is at least 60%, 62%, 65%, 67%, 70%, 72%, 75%, 77%, 80%, 82%, 85%, 87%, 90%, 92%, 95%, 97%, 98%, 99% identical to SEQ ID NO: 188, or a polypeptide sequence which is at least 60%, 62%, 65%, 67%, 70%, 72%, 75%, 77%, 80%, 82%, 85%, 87%, 90%, 92%, 95%, 97%, 98%, 99% identical to SEQ ID NO: 212.

[0377] In some embodiments, the second heavy chain comprises a polypeptide sequence which is at least 60%, 62%, 65%, 67%, 70%, 72%, 75%, 77%, 80%, 82%, 85%, 87%, 90%, 92%, 95%, 97%, 98%, 99% identical to SEQ ID NO: 49, a polypeptide sequence which is at least 60%, 62%, 65%, 67%, 70%, 72%, 75%, 77%, 80%, 82%, 85%, 87%, 90%, 92%, 95%, 97%, 98%, 99% identical to SEQ ID NO: 113, a polypeptide sequence which is at least 60%, 62%, 65%, 67%, 70%, 72%, 75%, 77%, 80%, 82%, 85%, 87%, 90%, 92%, 95%, 97%, 98%, 99% identical to SEQ ID NO: 137, a polypeptide sequence which is at least 60%, 62%, 65%, 67%, 70%, 72%, 75%, 77%, 80%, 82%, 85%, 87%, 90%, 92%, 95%, 97%, 98%, 99% identical to SEQ ID NO: 189, or a polypeptide sequence which is at least 60%, 62%, 65%, 67%, 70%, 72%, 75%, 77%, 80%, 82%, 85%, 87%, 90%, 92%, 95%, 97%, 98%, 99% identical to SEQ ID NO: 213. In some embodiments, the second light chain comprises a polypeptide sequence which is at least 60%, 62%, 65%, 67%, 70%, 72%, 75%, 77%, 80%, 82%, 85%, 87%, 90%, 92%, 95%, 97%, 98%, 99% identical to SEQ ID NO: 50, a polypeptide sequence which is at least 60%, 62%, 65%, 67%, 70%, 72%, 75%, 77%, 80%, 82%, 85%, 87%, 90%, 92%, 95%, 97%, 98%, 99% identical to SEQ ID NO: 114, a polypeptide sequence which is at least 60%, 62%, 65%, 67%, 70%, 72%, 75%, 77%, 80%, 82%, 85%, 87%, 90%, 92%, 95%, 97%, 98%, 99% identical to SEQ ID NO: 138, a polypeptide sequence which is at least 60%, 62%, 65%, 67%, 70%, 72%, 75%, 77%, 80%, 82%, 85%, 87%, 90%, 92%, 95%, 97%, 98%, 99% identical to SEQ ID NO: 190, or a polypeptide sequence which is at least 60%, 62%, 65%, 67%, 70%, 72%, 75%, 77%, 80%, 82%, 85%, 87%, 90%, 92%, 95%, 97%, 98%, 99% identical to SEQ ID NO: 214. In some embodiments, the variable domain of the first heavy chain comprises a polypeptide sequence which is at least 60%, 62%, 65%, 67%, 70%, 72%, 75%, 77%, 80%, 82%, 85%, 87%, 90%, 92%, 95%, 97%, 98%, 99% identical to SEQ ID NO: 35, a polypeptide sequence which is at least 60%, 62%, 65%, 67%, 70%, 72%, 75%, 77%, 80%, 82%, 85%, 87%, 90%, 92%, 95%, 97%, 98%, 99% identical to SEQ ID NO: 13.

[0378] In some embodiments, the variable domain of the first light chain comprises a polypeptide sequence which is at least 60%, 62%, 65%, 67%, 70%, 72%, 75%, 77%, 80%, 82%, 85%, 87%, 90%, 92%, 95%, 97%, 98%, 99% identical to SEQ ID NO: 36, a polypeptide sequence which is at least 60%, 62%, 65%, 67%, 70%, 72%, 75%, 77%, 80%, 82%, 85%, 87%, 90%, 92%, 95%, 97%, 98%, 99% identical to SEQ ID NO: 14. In some embodiments, the variable domain of the second heavy chain comprises a polypeptide sequence which is at least 60%, 62%, 65%, 67%, 70%, 72%, 75%, 77%, 80%, 82%, 85%, 87%, 90%, 92%, 95%, 97%, 98%, 99% identical to SEQ ID NO: 13, a polypeptide sequence which is at least 60%, 62%, 65%, 67%, 70%, 72%, 75%, 77%, 80%, 82%, 85%, 87%, 90%, 92%, 95%, 97%, 98%, 99% identical to SEQ ID NO: 45, a polypeptide sequence which is at least 60%, 62%, 65%, 67%, 70%, 72%, 75%, 77%, 80%, 82%, 85%, 87%, 90%, 92%, 95%, 97%, 98%, 99% identical to SEQ ID NO: 43. In some embodiments, the variable domain of the second light chain comprises a polypeptide sequence which is at least 60%, 62%, 65%, 67%, 70%, 72%, 75%, 77%, 80%, 82%, 85%, 87%, 90%, 92%, 95%, 97%, 98%, 99% identical to SEQ ID NO: 14, a polypeptide sequence which is at least 60%, 62%, 65%, 67%, 70%, 72%, 75%, 77%, 80%, 82%, 85%, 87%, 90%, 92%, 95%, 97%, 98%, 99% identical to SEQ ID NO: 46, a polypeptide sequence which is at least 60%, 62%, 65%, 67%, 70%, 72%, 75%, 77%, 80%, 82%, 85%, 87%, 90%, 92%, 95%, 97%, 98%, 99% identical to SEQ ID NO: 44.

[0379] In some embodiments, the variable domain of the first heavy chain comprises CDR1, CDR2, and CDR3 of SEQ ID NO: 47; CDR1, CDR2, and CDR3 of SEQ ID NO: 111; CDR1, CDR2, and CDR3 of SEQ ID NO: 135; CDR1, CDR2, and CDR3 of SEQ ID NO: 187; or CDR1, CDR2, and CDR3 of SEQ ID NO: 211. In some embodiments, the variable domain of the first light chain comprises CDR1, CDR2, and CDR3 of SEQ ID NO: 48, CDR1, CDR2, and CDR3 of SEQ ID NO: 112; CDR1, CDR2, and CDR3 of SEQ ID NO: 136; CDR1, CDR2, and CDR3 of SEQ ID NO: 188; or CDR1, CDR2, and CDR3 of SEQ ID NO: 212. In some embodiments, the variable domain of the second heavy chain comprises CDR1, CDR2, and CDR3 of SEQ ID NO: 49, CDR1, CDR2, and CDR3 of SEQ ID NO: 113; CDR1, CDR2, and CDR3 of SEQ ID NO: 137; CDR1, CDR2, and CDR3 of SEQ ID NO: 189; or CDR1, CDR2, and CDR3 of SEQ ID NO: 213. In some embodiments, the variable domain of the second light chain comprises CDR1, CDR2, and CDR3 SEQ ID NO: 50, CDR1, CDR2, and CDR3 of SEQ ID NO: 114; CDR1, CDR2, and CDR3 of SEQ ID NO: 138; CDR1, CDR2, and CDR3 of SEQ ID NO: 190; or CDR1, CDR2, and CDR3 of SEQ ID NO: 214.

[0380] In some embodiments, the molecule comprises SEQ ID NO: 47, SEQ ID NO: 48, SEQ ID NO: 49, and SEQ ID NO: 50. In some embodiments, the molecule comprises SEQ ID NO:111, SEQ ID NO: 112, SEQ ID NO: 113, and SEQ ID NO: 114. In some embodiments, the molecule comprises SEQ ID NO: 135, SEQ ID NO: 135, SEQ ID NO: 137, and SEQ ID NO: 138. In some embodiments, the molecule comprises SEQ ID NO: 187, SEQ ID NO: 188, SEQ ID NO: 189, and SEQ ID NO: 190. In some embodiments, the molecule comprises SEQ ID NO: 211, SEQ ID NO: 212, SEQ ID NO: 213, and SEQ ID NO: 214.

[0381] In some embodiments, the molecule further comprises one or more disulfide bonds. In some embodiments, the molecule further comprises one or more linker sequences. In some embodiments, the molecule is capable of neutralizing a coronavirus. In some embodiments, the coronavirus is a SARS-CoV-2 virus. In some embodiments, the SARS-CoV-2 virus strain is selected from the group consisting of WA1, B.1.1.7, B1.526, B1.351, P1, B1.352, and B.1.427. In some embodiments, the molecule specifically recognizes a first epitope and a second epitope on a SARS-CoV-2 particle. In some embodiments, the first epitope comprises at least a portion of a receptor binding domain (RBD) on a spike protein of a SARS-CoV-2 particle. In some embodiments, the second epitope comprises at least a portion of a N-terminal domain (NTD) on a spike protein of a SARS-CoV-2 particle.

[0382] In certain aspects, the invention provides a method of treating or preventing a COVID-19 infection in a subject in need thereof, the method comprising administering to the subject a composition comprising a bispecific molecule comprising a first polypeptide chain and a second polypeptide chain, wherein: the first polypeptide chain comprises: a first light chain comprising a variable domain and a constant domain; a first heavy chain comprising a variable domain and a constant domain; the second polypeptide chain comprises: a second light chain comprising a variable domain and a constant domain; and a second heavy chain comprising a variable domain and a constant domain. In some embodiments, the first polypeptide chain and the second polypeptide chain are covalently bonded to one another.

[0383] In some embodiments, the first heavy chain comprises a polypeptide sequence which is at least 60%, 62%, 65%, 67%, 70%, 72%, 75%, 77%, 80%, 82%, 85%, 87%, 90%, 92%, 95%, 97%, 98%, 99% identical to SEQ ID NO: 47, a polypeptide sequence which is at least 60%, 62%, 65%, 67%, 70%, 72%, 75%, 77%, 80%, 82%, 85%, 87%, 90%, 92%, 95%, 97%, 98%, 99% identical to SEQ ID NO: 111, a polypeptide sequence which is at least 60%, 62%, 65%, 67%, 70%, 72%, 75%, 77%, 80%, 82%, 85%, 87%, 90%, 92%, 95%, 97%, 98%, 99% identical to SEQ ID NO: 135, a polypeptide sequence which is at least 60%, 62%, 65%, 67%, 70%, 72%, 75%, 77%, 80%, 82%, 85%, 87%, 90%, 92%, 95%, 97%, 98%, 99% identical to SEQ ID NO: 187, or a polypeptide sequence which is at least 60%, 62%, 65%, 67%, 70%, 72%, 75%, 77%, 80%, 82%, 85%, 87%, 90%, 92%, 95%, 97%, 98%, 99% identical to SEQ ID NO: 211.

[0384] In some embodiments, the first light chain comprises a polypeptide sequence which is at least 60%, 62%, 65%, 67%, 70%, 72%, 75%, 77%, 80%, 82%, 85%, 87%, 90%, 92%, 95%, 97%, 98%, 99% identical to SEQ ID NO: 48, a polypeptide sequence which is at least 60%, 62%, 65%, 67%, 70%, 72%, 75%, 77%, 80%, 82%, 85%, 87%, 90%, 92%, 95%, 97%, 98%, 99% identical to SEQ ID NO: 112, a polypeptide sequence which is at least 60%, 62%, 65%, 67%, 70%, 72%, 75%, 77%, 80%, 82%, 85%, 87%, 90%, 92%, 95%, 97%, 98%, 99% identical to SEQ ID NO: 136, a polypeptide sequence which is at least 60%, 62%, 65%, 67%, 70%, 72%, 75%, 77%, 80%, 82%, 85%, 87%, 90%, 92%, 95%, 97%, 98%, 99% identical to SEQ ID NO: 188, or a polypeptide sequence which is at least 60%, 62%, 65%, 67%, 70%, 72%, 75%, 77%, 80%, 82%, 85%, 87%, 90%, 92%, 95%, 97%, 98%, 99% identical to SEQ ID NO: 212.

[0385] In some embodiments, the second heavy chain comprises a polypeptide sequence which is at least 60%, 62%, 65%, 67%, 70%, 72%, 75%, 77%, 80%, 82%, 85%, 87%, 90%, 92%, 95%, 97%, 98%, 99% identical to SEQ ID NO: 49, a polypeptide sequence which is at least 60%, 62%, 65%, 67%, 70%, 72%, 75%, 77%, 80%, 82%, 85%, 87%, 90%, 92%, 95%, 97%, 98%, 99% identical to SEQ ID NO: 113, a polypeptide sequence which is at least 60%, 62%, 65%, 67%, 70%, 72%, 75%, 77%, 80%, 82%, 85%, 87%, 90%, 92%, 95%, 97%, 98%, 99% identical to SEQ ID NO: 137, a polypeptide sequence which is at least 60%, 62%, 65%, 67%, 70%, 72%, 75%, 77%, 80%, 82%, 85%, 87%, 90%, 92%, 95%, 97%, 98%, 99% identical to SEQ ID NO: 189, or a polypeptide sequence which is at least 60%, 62%, 65%, 67%, 70%, 72%, 75%, 77%, 80%, 82%, 85%, 87%, 90%, 92%, 95%, 97%, 98%, 99% identical to SEQ ID NO: 213.

[0386] In some embodiments, the second light chain comprises a polypeptide sequence which is at least 60%, 62%, 65%, 67%, 70%, 72%, 75%, 77%, 80%, 82%, 85%, 87%, 90%, 92%, 95%, 97%, 98%, 99% identical to SEQ ID NO: 50, a polypeptide sequence which is at least 60%, 62%, 65%, 67%, 70%, 72%, 75%, 77%, 80%, 82%, 85%, 87%, 90%, 92%, 95%, 97%, 98%, 99% identical to SEQ ID NO: 114, a polypeptide sequence which is at least 60%, 62%, 65%, 67%, 70%, 72%, 75%, 77%, 80%, 82%, 85%, 87%, 90%, 92%, 95%, 97%, 98%, 99% identical to SEQ ID NO: 138, a polypeptide sequence which is at least 60%, 62%, 65%, 67%, 70%, 72%, 75%, 77%, 80%, 82%, 85%, 87%, 90%, 92%, 95%, 97%, 98%, 99% identical to SEQ ID NO: 190, or a polypeptide sequence which is at least 60%, 62%, 65%, 67%, 70%, 72%, 75%, 77%, 80%, 82%, 85%, 87%, 90%, 92%, 95%, 97%, 98%, 99% identical to SEQ ID NO: 214.

[0387] In some embodiments, the variable domain of the first heavy chain comprises a polypeptide sequence which is at least 60%, 62%, 65%, 67%, 70%, 72%, 75%, 77%, 80%, 82%, 85%, 87%, 90%, 92%, 95%, 97%, 98%, 99% identical to SEQ ID NO: 35, a polypeptide sequence which is at least 60%, 62%, 65%, 67%, 70%, 72%, 75%, 77%, 80%, 82%, 85%, 87%, 90%, 92%, 95%, 97%, 98%, 99% identical to SEQ ID NO: 13. In some embodiments, the variable domain of the first light chain comprises a polypeptide sequence which is at least 60%, 62%, 65%, 67%, 70%, 72%, 75%, 77%, 80%, 82%, 85%, 87%, 90%, 92%, 95%, 97%, 98%, 99% identical to SEQ ID NO: 36, a polypeptide sequence which is at least 60%, 62%, 65%, 67%, 70%, 72%, 75%, 77%, 80%, 82%, 85%, 87%, 90%, 92%, 95%, 97%, 98%, 99% identical to SEQ ID NO: 14. In some embodiments, the variable domain of the second heavy chain comprises a polypeptide sequence which is at least 60%, 62%, 65%, 67%, 70%, 72%, 75%, 77%, 80%, 82%, 85%, 87%, 90%, 92%, 95%, 97%, 98%, 99% identical to SEQ ID NO: 13, a polypeptide sequence which is at least 60%, 62%, 65%, 67%, 70%, 72%, 75%, 77%, 80%, 82%, 85%, 87%, 90%, 92%, 95%, 97%, 98%, 99% identical to SEQ ID NO: 45, a polypeptide sequence which is at least 60%, 62%, 65%, 67%, 70%, 72%, 75%, 77%, 80%, 82%, 85%, 87%, 90%, 92%, 95%, 97%, 98%, 99% identical to SEQ ID NO: 43.

[0388] In some embodiments, the variable domain of the second light chain comprises a polypeptide sequence which is at least 60%, 62%, 65%, 67%, 70%, 72%, 75%, 77%, 80%, 82%, 85%, 87%, 90%, 92%, 95%, 97%, 98%, 99% identical to SEQ ID NO: 14, a polypeptide sequence which is at least 60%, 62%, 65%, 67%, 70%, 72%, 75%, 77%, 80%, 82%, 85%, 87%, 90%, 92%, 95%, 97%, 98%, 99% identical to SEQ ID NO: 46, a polypeptide sequence which is at least 60%, 62%, 65%, 67%, 70%, 72%, 75%, 77%, 80%, 82%, 85%, 87%, 90%, 92%, 95%, 97%, 98%, 99% identical to SEQ ID NO: 44.

[0389] In some embodiments, the variable domain of the first heavy chain comprises CDR1, CDR2, and CDR3 of SEQ ID NO: 47; CDR1, CDR2, and CDR3 of SEQ ID NO: 111; CDR1, CDR2, and CDR3 of SEQ ID NO: 135; CDR1, CDR2, and CDR3 of SEQ ID NO: 187; or CDR1, CDR2, and CDR3 of SEQ ID NO: 211. In some embodiments, the variable domain of the first light chain comprises CDR1, CDR2, and CDR3 of SEQ ID NO: 48, CDR1, CDR2, and CDR3 of SEQ ID NO: 112; CDR1, CDR2, and CDR3 of SEQ ID NO: 136; CDR1, CDR2, and CDR3 of SEQ ID NO: 188; or CDR1, CDR2, and CDR3 of SEQ ID NO: 212. In some embodiments, the variable domain of the second heavy chain comprises CDR1, CDR2, and CDR3 of SEQ ID NO: 49, CDR1, CDR2, and CDR3 of SEQ ID NO: 113; CDR1, CDR2, and CDR3 of SEQ ID NO: 137; CDR1, CDR2, and CDR3 of SEQ ID NO: 189; or CDR1, CDR2, and CDR3 of SEQ ID NO: 213. In some embodiments, the variable domain of the second light chain comprises CDR1, CDR2, and CDR3 SEQ ID NO: 50, CDR1, CDR2, and CDR3 of SEQ ID NO: 114; CDR1, CDR2, and CDR3 of SEQ ID NO: 138; CDR1, CDR2, and CDR3 of SEQ ID NO: 190; or CDR1, CDR2, and CDR3 of SEQ ID NO: 214. In some embodiments, the molecule comprises SEQ ID NO: 47, SEQ ID NO: 48, SEQ ID NO: 49, and SEQ ID NO: 50. In some embodiments, the molecule comprises SEQ ID NO:111, SEQ ID NO: 112, SEQ ID NO: 113, and SEQ ID NO: 114. In some embodiments, the molecule comprises SEQ ID NO: 135, SEQ ID NO: 135, SEQ ID NO: 137, and SEQ ID NO: 138. In some embodiments, the molecule comprises SEQ ID NO: 187, SEQ ID NO: 188, SEQ ID NO: 189, and SEQ ID NO: 190. In some embodiments, the molecule comprises SEQ ID NO: 211, SEQ ID NO: 212, SEQ ID NO: 213, and SEQ ID NO: 214.

[0390] In some embodiments, the molecule further comprises one or more disulfide bonds. In some embodiments, the molecule further comprises one or more linker sequences. In some embodiments, the molecule is capable of neutralizing a coronavirus. In some embodiments, the coronavirus is a SARS-CoV-2 virus. In some embodiments, the SARS-CoV-2 virus strain is selected from the group consisting of WA1, B.1.1.7, B1.526, B1.351, P1, B1.352, and B.1.427.

[0391] In some embodiments, the molecule specifically recognizes a first epitope and a second epitope on a SARS-CoV-2 particle. In some embodiments, the first epitope comprises at least a portion of a receptor binding domain (RBD) on a spike protein of a SARS-CoV-2 particle. In some embodiments, the second epitope comprises at least a portion of a N-terminal domain (NTD) on a spike protein of a SARS-CoV-2 particle. In some embodiments, the composition is administered in combination with a second therapeutic agent.

[0392] In certain aspects, the invention provides a bispecific molecule comprising a first polypeptide chain and a second polypeptide chain, wherein: the first polypeptide chain comprises: a first light chain comprising a variable domain and a constant domain; a first heavy chain comprising a variable domain and a constant domain; the second polypeptide chain comprises: a second light chain comprising a variable domain and a constant domain; and a second heavy chain comprising a variable domain and a constant domain.

[0393] In some embodiments, the first polypeptide chain and the second polypeptide chain are covalently bonded to one another. In some embodiments, the first heavy chain comprises a polypeptide sequence which is at least 60%, 62%, 65%, 67%, 70%, 72%, 75%, 77%, 80%, 82%, 85%, 87%, 90%, 92%, 95%, 97%, 98%, 99% identical to SEQ ID NO: 59 or a polypeptide sequence which is at least 60%, 62%, 65%, 67%, 70%, 72%, 75%, 77%, 80%, 82%, 85%, 87%, 90%, 92%, 95%, 97%, 98%, 99% identical to SEQ ID NO: 63. In some embodiments, the first light chain comprises a polypeptide sequence which is at least 60%, 62%, 65%, 67%, 70%, 72%, 75%, 77%, 80%, 82%, 85%, 87%, 90%, 92%, 95%, 97%, 98%, 99% identical to SEQ ID NO: 60 or a polypeptide sequence which is at least 60%, 62%, 65%, 67%, 70%, 72%, 75%, 77%, 80%, 82%, 85%, 87%, 90%, 92%, 95%, 97%, 98%, 99% identical to SEQ ID NO: 64. In some embodiments, the second heavy chain comprises a polypeptide sequence which is at least 60%, 62%, 65%, 67%, 70%, 72%, 75%, 77%, 80%, 82%, 85%, 87%, 90%, 92%, 95%, 97%, 98%, 99% identical to SEQ ID NO: 61 or a polypeptide sequence which is at least 60%, 62%, 65%, 67%, 70%, 72%, 75%, 77%, 80%, 82%, 85%, 87%, 90%, 92%, 95%, 97%, 98%, 99% identical to SEQ ID NO: 65. In some embodiments, the second light chain comprises a polypeptide sequence which is at least 60%, 62%, 65%, 67%, 70%, 72%, 75%, 77%, 80%, 82%, 85%, 87%, 90%, 92%, 95%, 97%, 98%, 99% identical to SEQ ID NO: 62 or a polypeptide sequence which is at least 60%, 62%, 65%, 67%, 70%, 72%, 75%, 77%, 80%, 82%, 85%, 87%, 90%, 92%, 95%, 97%, 98%, 99% identical to SEQ ID NO: 66.

[0394] In some embodiments, the first heavy chain comprises SEQ ID NO: 59 or SEQ ID NO: 63. In some embodiments, the first light chain comprises SEQ ID NO: 60 or SEQ ID NO: 64. In some embodiments, the second heavy chain comprises SEQ ID NO: 61 or SEQ ID NO: 65. In some embodiments, the second light chain comprises SEQ ID NO: 62 or SEQ ID NO: 66.

[0395] In some embodiments, the variable domain of the first heavy chain comprises CDR1, CDR2, and CDR3 of SEQ ID NO: 59 or CDR1, CDR2, and CDR3 of SEQ ID NO: 63. In some embodiments, the variable domain of the first light chain comprises CDR1, CDR2, and CDR3 of SEQ ID NO: 60 or CDR1, CDR2, and CDR3 of SEQ ID NO: 64. In some embodiments, the variable domain of the second heavy chain comprises CDR1, CDR2, and CDR3 of SEQ ID NO: 61 or CDR1, CDR2, and CDR3 of SEQ ID NO: 65. In some embodiments, the variable domain of the second light chain comprises CDR1, CDR2, and CDR3 SEQ ID NO: 62 or CDR1, CDR2, and CDR3 of SEQ ID NO: 66.

[0396] In some embodiments, the variable domain of the first heavy chain comprises a polypeptide sequence which is at least 60%, 62%, 65%, 67%, 70%, 72%, 75%, 77%, 80%, 82%, 85%, 87%, 90%, 92%, 95%, 97%, 98%, 99% identical to SEQ ID NO: 13 or a polypeptide sequence which is at least 60%, 62%, 65%, 67%, 70%, 72%, 75%, 77%, 80%, 82%, 85%, 87%, 90%, 92%, 95%, 97%, 98%, 99% identical to SEQ ID NO: 27. In some embodiments, the variable domain of the first light chain comprises a polypeptide sequence which is at least 60%, 62%, 65%, 67%, 70%, 72%, 75%, 77%, 80%, 82%, 85%, 87%, 90%, 92%, 95%, 97%, 98%, 99% identical to SEQ ID NO: 14 or a polypeptide sequence which is at least 60%, 62%, 65%, 67%, 70%, 72%, 75%, 77%, 80%, 82%, 85%, 87%, 90%, 92%, 95%, 97%, 98%, 99% identical to SEQ ID NO: 28. In some embodiments, the variable domain of the second heavy chain comprises a polypeptide sequence which is at least 60%, 62%, 65%, 67%, 70%, 72%, 75%, 77%, 80%, 82%, 85%, 87%, 90%, 92%, 95%, 97%, 98%, 99% identical to SEQ ID NO: 27 or a polypeptide sequence which is at least 60%, 62%, 65%, 67%, 70%, 72%, 75%, 77%, 80%, 82%, 85%, 87%, 90%, 92%, 95%, 97%, 98%, 99% identical to SEQ ID NO: 13. In some embodiments, the variable domain of the second light chain comprises a polypeptide sequence which is at least 60%, 62%, 65%, 67%, 70%, 72%, 75%, 77%, 80%, 82%, 85%, 87%, 90%, 92%, 95%, 97%, 98%, 99% identical to SEQ ID NO: 28 or a polypeptide sequence which is at least 60%, 62%, 65%, 67%, 70%, 72%, 75%, 77%, 80%, 82%, 85%, 87%, 90%, 92%, 95%, 97%, 98%, 99% identical to SEQ ID NO: 14.

[0397] In some embodiments, the variable domain of the first heavy chain comprises SEQ ID NO: 13 or SEQ ID NO: 27. In some embodiments, the variable domain of the first light chain comprises SEQ ID NO: 14 or SEQ ID NO: 28. In some embodiments, the variable domain of the second heavy chain comprises SEQ ID NO: 27 or SEQ ID NO: 13. In some embodiments, the variable domain of the second light chain comprises SEQ ID NO: 28 or SEQ ID NO: 14.

[0398] In some embodiments, the molecule comprises a polypeptide sequence which is at least 60%, 62%, 65%, 67%, 70%, 72%, 75%, 77%, 80%, 82%, 85%, 87%, 90%, 92%, 95%, 97%, 98%, 99% identical to SEQ ID NOs: 59, a polypeptide sequence which is at least 60%, 62%, 65%, 67%, 70%, 72%, 75%, 77%, 80%, 82%, 85%, 87%, 90%, 92%, 95%, 97%, 98%, 99% identical to SEQ ID NO: 60, a polypeptide sequence which is at least 60%, 62%, 65%, 67%, 70%, 72%, 75%, 77%, 80%, 82%, 85%, 87%, 90%, 92%, 95%, 97%, 98%, 99% identical to SEQ ID NO: 61, and a polypeptide sequence which is at least 60%, 62%, 65%, 67%, 70%, 72%, 75%, 77%, 80%, 82%, 85%, 87%, 90%, 92%, 95%, 97%, 98%, 99% identical to SEQ ID NO: 62. In some embodiments, the molecule comprises a polypeptide sequence which is at least 60%, 62%, 65%, 67%, 70%, 72%, 75%, 77%, 80%, 82%, 85%, 87%, 90%, 92%, 95%, 97%, 98%, 99% identical to SEQ ID NOs: 63, a polypeptide sequence which is at least 60%, 62%, 65%, 67%, 70%, 72%, 75%, 77%, 80%, 82%, 85%, 87%, 90%, 92%, 95%, 97%, 98%, 99% identical to SEQ ID NO: 64, a polypeptide sequence which is at least 60%, 62%, 65%, 67%, 70%, 72%, 75%, 77%, 80%, 82%, 85%, 87%, 90%, 92%, 95%, 97%, 98%, 99% identical to SEQ ID NO: 65, and a polypeptide sequence which is at least 60%, 62%, 65%, 67%, 70%, 72%, 75%, 77%, 80%, 82%, 85%, 87%, 90%, 92%, 95%, 97%, 98%, 99% identical to SEQ ID NO: 66. In some embodiments, the molecule comprises a polypeptide sequence which is at least 60%, 62%, 65%, 67%, 70%, 72%, 75%, 77%, 80%, 82%, 85%, 87%, 90%, 92%, 95%, 97%, 98%, 99% identical to SEQ ID NOs: 13, a polypeptide sequence which is at least 60%, 62%, 65%, 67%, 70%, 72%, 75%, 77%, 80%, 82%, 85%, 87%, 90%, 92%, 95%, 97%, 98%, 99% identical to SEQ ID NO: 14, a polypeptide sequence which is at least 60%, 62%, 65%, 67%, 70%, 72%, 75%, 77%, 80%, 82%, 85%, 87%, 90%, 92%, 95%, 97%, 98%, 99% identical to SEQ ID NO: 27, and a polypeptide sequence which is at least 60%, 62%, 65%, 67%, 70%, 72%, 75%, 77%, 80%, 82%, 85%, 87%, 90%, 92%, 95%, 97%, 98%, 99% identical to SEQ ID NO: 28.

[0399] In some embodiments, the molecule comprises SEQ ID NOs: 59, 60, 61, and 62. In some embodiments, the molecule comprises SEQ ID NOs: 63, 64, 65, and 66. In some embodiments, the molecule comprises SEQ ID NOs: 13, 14, 27, and 28.

[0400] In some embodiments, the molecule further comprises one or more disulfide bonds. In some embodiments, the molecule further comprises one or more linker sequences. In some embodiments, the molecule is capable of neutralizing a coronavirus. In some embodiments, the coronavirus is a SARS-CoV-2 virus strain. In some embodiments, the molecule specifically recognizes a first epitope and a second epitope on a SARS-CoV-2 particle. In some embodiments, the first epitope comprises at least a portion of a receptor binding domain (RBD) on an S protein of a SARS-CoV-2 particle. In some embodiments, the second epitope comprises at least a portion of a N-terminal domain (NTD) on an S protein of a SARS-CoV-2 particle.

[0401] In certain aspects, the invention provides a method of treating a COVID-19 infection in a subject in need thereof, the method comprising administering to the subject a composition comprising a bispecific molecule, wherein the bispecific molecule comprises a first polypeptide chain and a second polypeptide chain, wherein: the first polypeptide chain comprises: a first light chain comprising a variable domain and a constant domain; a first heavy chain comprising a variable domain and a constant domain; the second polypeptide chain comprises: a second light chain comprising a variable domain and a constant domain; and a second heavy chain comprising a variable domain and a constant domain.

[0402] In some embodiments, the first polypeptide chain and the second polypeptide chain are covalently bonded to one another. In some embodiments, the first heavy chain comprises a polypeptide sequence which is at least 60%, 62%, 65%, 67%, 70%, 72%, 75%, 77%, 80%, 82%, 85%, 87%, 90%, 92%, 95%, 97%, 98%, 99% identical to SEQ ID NO: 59 or a polypeptide sequence which is at least 60%, 62%, 65%, 67%, 70%, 72%, 75%, 77%, 80%, 82%, 85%, 87%, 90%, 92%, 95%, 97%, 98%, 99% identical to SEQ ID NO: 63. In some embodiments, the first light chain comprises a polypeptide sequence which is at least 60%, 62%, 65%, 67%, 70%, 72%, 75%, 77%, 80%, 82%, 85%, 87%, 90%, 92%, 95%, 97%, 98%, 99% identical to SEQ ID NO: 60 or a polypeptide sequence which is at least 60%, 62%, 65%, 67%, 70%, 72%, 75%, 77%, 80%, 82%, 85%, 87%, 90%, 92%, 95%, 97%, 98%, 99% identical to SEQ ID NO: 64. In some embodiments, the second heavy chain comprises a polypeptide sequence which is at least 60%, 62%, 65%, 67%, 70%, 72%, 75%, 77%, 80%, 82%, 85%, 87%, 90%, 92%, 95%, 97%, 98%, 99% identical to SEQ ID NO: 61 or a polypeptide sequence which is at least 60%, 62%, 65%, 67%, 70%, 72%, 75%, 77%, 80%, 82%, 85%, 87%, 90%, 92%, 95%, 97%, 98%, 99% identical to SEQ ID NO: 65. In some embodiments, the second light chain comprises a polypeptide sequence which is at least 60%, 62%, 65%, 67%, 70%, 72%, 75%, 77%, 80%, 82%, 85%, 87%, 90%, 92%, 95%, 97%, 98%, 99% identical to SEQ ID NO: 62 or a polypeptide sequence which is at least 60%, 62%, 65%, 67%, 70%, 72%, 75%, 77%, 80%, 82%, 85%, 87%, 90%, 92%, 95%, 97%, 98%, 99% identical to SEQ ID NO: 66.

[0403] In some embodiments, the first heavy chain comprises SEQ ID NO: 59 or SEQ ID NO: 63. In some embodiments, the first light chain comprises SEQ ID NO: 60 or SEQ ID NO: 64. In some embodiments, the second heavy chain comprises SEQ ID NO: 61 or SEQ ID NO: 65. In some embodiments, the second light chain comprises SEQ ID NO: 62 or SEQ ID NO: 66. In some embodiments, the variable domain of the first heavy chain comprises CDR1, CDR2, and CDR3 of SEQ ID NO: 59 or CDR1, CDR2, and CDR3 of SEQ ID NO: 63. In some embodiments, the variable domain of the first light chain comprises CDR1, CDR2, and CDR3 of SEQ ID NO: 60 or CDR1, CDR2, and CDR3 of SEQ ID NO: 64. In some embodiments, the variable domain of the second heavy chain comprises CDR1, CDR2, and CDR3 of SEQ ID NO: 61 or CDR1, CDR2, and CDR3 of SEQ ID NO: 65. In some embodiments, the variable domain of the second light chain comprises CDR1, CDR2, and CDR3 SEQ ID NO: 62 or CDR1, CDR2, and CDR3 of SEQ ID NO: 66.

[0404] In some embodiments, the variable domain of the first heavy chain comprises a polypeptide sequence which is at least 60%, 62%, 65%, 67%, 70%, 72%, 75%, 77%, 80%, 82%, 85%, 87%, 90%, 92%, 95%, 97%, 98%, 99% identical to SEQ ID NO: 13 or a polypeptide sequence which is at least 60%, 62%, 65%, 67%, 70%, 72%, 75%, 77%, 80%, 82%, 85%, 87%, 90%, 92%, 95%, 97%, 98%, 99% identical to SEQ ID NO: 27. In some embodiments, the variable domain of the first light chain comprises a polypeptide sequence which is at least 60%, 62%, 65%, 67%, 70%, 72%, 75%, 77%, 80%, 82%, 85%, 87%, 90%, 92%, 95%, 97%, 98%, 99% identical to SEQ ID NO: 14 or a polypeptide sequence which is at least 60%, 62%, 65%, 67%, 70%, 72%, 75%, 77%, 80%, 82%, 85%, 87%, 90%, 92%, 95%, 97%, 98%, 99% identical to SEQ ID NO: 28. In some embodiments, the variable domain of the second heavy chain comprises a polypeptide sequence which is at least 60%, 62%, 65%, 67%, 70%, 72%, 75%, 77%, 80%, 82%, 85%, 87%, 90%, 92%, 95%, 97%, 98%, 99% identical to SEQ ID NO: 27 or a polypeptide sequence which is at least 60%, 62%, 65%, 67%, 70%, 72%, 75%, 77%, 80%, 82%, 85%, 87%, 90%, 92%, 95%, 97%, 98%, 99% identical to SEQ ID NO: 13. In some embodiments, the variable domain of the second light chain comprises a polypeptide sequence which is at least 60%, 62%, 65%, 67%, 70%, 72%, 75%, 77%, 80%, 82%, 85%, 87%, 90%, 92%, 95%, 97%, 98%, 99% identical to SEQ ID NO: 28 or a polypeptide sequence which is at least 60%, 62%, 65%, 67%, 70%, 72%, 75%, 77%, 80%, 82%, 85%, 87%, 90%, 92%, 95%, 97%, 98%, 99% identical to SEQ ID NO: 14.

[0405] In some embodiments, the variable domain of the first heavy chain comprises SEQ ID NO: 13 or SEQ ID NO: 27. In some embodiments, the variable domain of the first light chain comprises SEQ ID NO: 14 or SEQ ID NO: 28. In some embodiments, the variable domain of the second heavy chain comprises SEQ ID NO: 27 or SEQ ID NO: 13. In some embodiments, the variable domain of the second light chain comprises SEQ ID NO: 28 or SEQ ID NO: 14.

[0406] In some embodiments, the molecule comprises a polypeptide sequence which is at least 60%, 62%, 65%, 67%, 70%, 72%, 75%, 77%, 80%, 82%, 85%, 87%, 90%, 92%, 95%, 97%, 98%, 99% identical to SEQ ID NOs: 59, a polypeptide sequence which is at least 60%, 62%, 65%, 67%, 70%, 72%, 75%, 77%, 80%, 82%, 85%, 87%, 90%, 92%, 95%, 97%, 98%, 99% identical to SEQ ID NO: 60, a polypeptide sequence which is at least 60%, 62%, 65%, 67%, 70%, 72%, 75%, 77%, 80%, 82%, 85%, 87%, 90%, 92%, 95%, 97%, 98%, 99% identical to SEQ ID NO: 61, and a polypeptide sequence which is at least 60%, 62%, 65%, 67%, 70%, 72%, 75%, 77%, 80%, 82%, 85%, 87%, 90%, 92%, 95%, 97%, 98%, 99% identical to SEQ ID NO: 62. In some embodiments, the molecule comprises a polypeptide sequence which is at least 60%, 62%, 65%, 67%, 70%, 72%, 75%, 77%, 80%, 82%, 85%, 87%, 90%, 92%, 95%, 97%, 98%, 99% identical to SEQ ID NOs: 63, a polypeptide sequence which is at least 60%, 62%, 65%, 67%, 70%, 72%, 75%, 77%, 80%, 82%, 85%, 87%, 90%, 92%, 95%, 97%, 98%, 99% identical to SEQ ID NO: 64, a polypeptide sequence which is at least 60%, 62%, 65%, 67%, 70%, 72%, 75%, 77%, 80%, 82%, 85%, 87%, 90%, 92%, 95%, 97%, 98%, 99% identical to SEQ ID NO: 65, and a polypeptide sequence which is at least 60%, 62%, 65%, 67%, 70%, 72%, 75%, 77%, 80%, 82%, 85%, 87%, 90%, 92%, 95%, 97%, 98%, 99% identical to SEQ ID NO: 66. In some embodiments, the molecule comprises a polypeptide sequence which is at least 60%, 62%, 65%, 67%, 70%, 72%, 75%, 77%, 80%, 82%, 85%, 87%, 90%, 92%, 95%, 97%, 98%, 99% identical to SEQ ID NOs: 13, a polypeptide sequence which is at least 60%, 62%, 65%, 67%, 70%, 72%, 75%, 77%, 80%, 82%, 85%, 87%, 90%, 92%, 95%, 97%, 98%, 99% identical to SEQ ID NO: 14, a polypeptide sequence which is at least 60%, 62%, 65%, 67%, 70%, 72%, 75%, 77%, 80%, 82%, 85%, 87%, 90%, 92%, 95%, 97%, 98%, 99% identical to SEQ ID NO: 27, and a polypeptide sequence which is at least 60%, 62%, 65%, 67%, 70%, 72%, 75%, 77%, 80%, 82%, 85%, 87%, 90%, 92%, 95%, 97%, 98%, 99% identical to SEQ ID NO: 28.

[0407] In some embodiments, the molecule comprises SEQ ID NOs: 59, 60, 61, and 62. In some embodiments, the molecule comprises SEQ ID NOs: 63, 64, 65, and 66. In some embodiments, the molecule comprises SEQ ID NOs: 13, 14, 27, and 28.

[0408] In some embodiments, the molecule further comprises one or more disulfide bonds. In some embodiments, the molecule further comprises one or more linker sequences. In some embodiments, the molecule is capable of neutralizing a coronavirus. In some embodiments, the coronavirus is a SARS-CoV-2 virus strain. In some embodiments, the molecule specifically recognizes a first epitope and a second epitope on a SARS-CoV-2 particle. In some embodiments, the first epitope comprises at least a portion of a receptor binding domain (RBD) on a spike protein of a SARS-CoV-2 particle. In some embodiments, the second epitope comprises at least a portion of a N-terminal domain (NTD) on a spike protein of a SARS-CoV-2 particle. In some embodiments, the composition is administered in combination with a second therapeutic agent.

[0409] In certain aspects, the invention provides a method of preventing a COVID-19 infection in a subject in need thereof, the method comprising administering to the subject a composition comprising a bispecific molecule, wherein the bispecific molecule comprises a first polypeptide chain and a second polypeptide chain, wherein: the first polypeptide chain comprises: a first light chain comprising a variable domain and a constant domain; a first heavy chain comprising a variable domain and a constant domain; the second polypeptide chain comprises: a second light chain comprising a variable domain and a constant domain; and a second heavy chain comprising a variable domain and a constant domain.

[0410] In some embodiments, the first polypeptide chain and the second polypeptide chain are covalently bonded to one another. In some embodiments, the first heavy chain comprises a polypeptide sequence which is at least 60%, 62%, 65%, 67%, 70%, 72%, 75%, 77%, 80%, 82%, 85%, 87%, 90%, 92%, 95%, 97%, 98%, 99% identical to SEQ ID NO: 59 or a polypeptide sequence which is at least 60%, 62%, 65%, 67%, 70%, 72%, 75%, 77%, 80%, 82%, 85%, 87%, 90%, 92%, 95%, 97%, 98%, 99% identical to SEQ ID NO: 63. In some embodiments, the first light chain comprises a polypeptide sequence which is at least 60%, 62%, 65%, 67%, 70%, 72%, 75%, 77%, 80%, 82%, 85%, 87%, 90%, 92%, 95%, 97%, 98%, 99% identical to SEQ ID NO: 60 or a polypeptide sequence which is at least 60%, 62%, 65%, 67%, 70%, 72%, 75%, 77%, 80%, 82%, 85%, 87%, 90%, 92%, 95%, 97%, 98%, 99% identical to SEQ ID NO: 64. In some embodiments, the second heavy chain comprises a polypeptide sequence which is at least 60%, 62%, 65%, 67%, 70%, 72%, 75%, 77%, 80%, 82%, 85%, 87%, 90%, 92%, 95%, 97%, 98%, 99% identical to SEQ ID NO: 61 or a polypeptide sequence which is at least 60%, 62%, 65%, 67%, 70%, 72%, 75%, 77%, 80%, 82%, 85%, 87%, 90%, 92%, 95%, 97%, 98%, 99% identical to SEQ ID NO: 65. In some embodiments, the second light chain comprises a polypeptide sequence which is at least 60%, 62%, 65%, 67%, 70%, 72%, 75%, 77%, 80%, 82%, 85%, 87%, 90%, 92%, 95%, 97%, 98%, 99% identical to SEQ ID NO: 62 or a polypeptide sequence which is at least 60%, 62%, 65%, 67%, 70%, 72%, 75%, 77%, 80%, 82%, 85%, 87%, 90%, 92%, 95%, 97%, 98%, 99% identical to SEQ ID NO: 66.

[0411] In some embodiments, the first heavy chain comprises SEQ ID NO: 59 or SEQ ID NO: 63. In some embodiments, the first light chain comprises SEQ ID NO: 60 or SEQ ID NO: 64. In some embodiments, the second heavy chain comprises SEQ ID NO: 61 or SEQ ID NO: 65. In some embodiments, the second light chain comprises SEQ ID NO: 62 or SEQ ID NO: 66.

[0412] In some embodiments, the variable domain of the first heavy chain comprises CDR1, CDR2, and CDR3 of SEQ ID NO: 59 or CDR1, CDR2, and CDR3 of SEQ ID NO: 63. In some embodiments, the variable domain of the first light chain comprises CDR1, CDR2, and CDR3 of SEQ ID NO: 60 or CDR1, CDR2, and CDR3 of SEQ ID NO: 64. In some embodiments, the variable domain of the second heavy chain comprises CDR1, CDR2, and CDR3 of SEQ ID NO: 61 or CDR1, CDR2, and CDR3 of SEQ ID NO: 65. In some embodiments, the variable domain of the second light chain comprises CDR1, CDR2, and CDR3 SEQ ID NO: 62 or CDR1, CDR2, and CDR3 of SEQ ID NO: 66.

[0413] In some embodiments, the variable domain of the first heavy chain comprises a polypeptide sequence which is at least 60%, 62%, 65%, 67%, 70%, 72%, 75%, 77%, 80%, 82%, 85%, 87%, 90%, 92%, 95%, 97%, 98%, 99% identical to SEQ ID NO: 13 or a polypeptide sequence which is at least 60%, 62%, 65%, 67%, 70%, 72%, 75%, 77%, 80%, 82%, 85%, 87%, 90%, 92%, 95%, 97%, 98%, 99% identical to SEQ ID NO: 27. In some embodiments, the variable domain of the first light chain comprises a polypeptide sequence which is at least 60%, 62%, 65%, 67%, 70%, 72%, 75%, 77%, 80%, 82%, 85%, 87%, 90%, 92%, 95%, 97%, 98%, 99% identical to SEQ ID NO: 14 or a polypeptide sequence which is at least 60%, 62%, 65%, 67%, 70%, 72%, 75%, 77%, 80%, 82%, 85%, 87%, 90%, 92%, 95%, 97%, 98%, 99% identical to SEQ ID NO: 28. In some embodiments, the variable domain of the second heavy chain comprises a polypeptide sequence which is at least 60%, 62%, 65%, 67%, 70%, 72%, 75%, 77%, 80%, 82%, 85%, 87%, 90%, 92%, 95%, 97%, 98%, 99% identical to SEQ ID NO: 27 or a polypeptide sequence which is at least 60%, 62%, 65%, 67%, 70%, 72%, 75%, 77%, 80%, 82%, 85%, 87%, 90%, 92%, 95%, 97%, 98%, 99% identical to SEQ ID NO: 13. In some embodiments, the variable domain of the second light chain comprises a polypeptide sequence which is at least 60%, 62%, 65%, 67%, 70%, 72%, 75%, 77%, 80%, 82%, 85%, 87%, 90%, 92%, 95%, 97%, 98%, 99% identical to SEQ ID NO: 28 or a polypeptide sequence which is at least 60%, 62%, 65%, 67%, 70%, 72%, 75%, 77%, 80%, 82%, 85%, 87%, 90%, 92%, 95%, 97%, 98%, 99% identical to SEQ ID NO: 14.

[0414] In some embodiments, the variable domain of the first heavy chain comprises SEQ ID NO: 13 or SEQ ID NO: 27. In some embodiments, the variable domain of the first light chain comprises SEQ ID NO: 14 or SEQ ID NO: 28. In some embodiments, the variable domain of the second heavy chain comprises SEQ ID NO: 27 or SEQ ID NO: 13. In some embodiments, the variable domain of the second light chain comprises SEQ ID NO: 28 or SEQ ID NO: 14.

[0415] In some embodiments, the molecule comprises a polypeptide sequence which is at least 60%, 62%, 65%, 67%, 70%, 72%, 75%, 77%, 80%, 82%, 85%, 87%, 90%, 92%, 95%, 97%, 98%, 99% identical to SEQ ID NOs: 59, a polypeptide sequence which is at least 60%, 62%, 65%, 67%, 70%, 72%, 75%, 77%, 80%, 82%, 85%, 87%, 90%, 92%, 95%, 97%, 98%, 99% identical to SEQ ID NO: 60, a polypeptide sequence which is at least 60%, 62%, 65%, 67%, 70%, 72%, 75%, 77%, 80%, 82%, 85%, 87%, 90%, 92%, 95%, 97%, 98%, 99% identical to SEQ ID NO: 61, and a polypeptide sequence which is at least 60%, 62%, 65%, 67%, 70%, 72%, 75%, 77%, 80%, 82%, 85%, 87%, 90%, 92%, 95%, 97%, 98%, 99% identical to SEQ ID NO: 62. In some embodiments, the molecule comprises a polypeptide sequence which is at least 60%, 62%, 65%, 67%, 70%, 72%, 75%, 77%, 80%, 82%, 85%, 87%, 90%, 92%, 95%, 97%, 98%, 99% identical to SEQ ID NOs: 63, a polypeptide sequence which is at least 60%, 62%, 65%, 67%, 70%, 72%, 75%, 77%, 80%, 82%, 85%, 87%, 90%, 92%, 95%, 97%, 98%, 99% identical to SEQ ID NO: 64, a polypeptide sequence which is at least 60%, 62%, 65%, 67%, 70%, 72%, 75%, 77%, 80%, 82%, 85%, 87%, 90%, 92%, 95%, 97%, 98%, 99% identical to SEQ ID NO: 65, and a polypeptide sequence which is at least 60%, 62%, 65%, 67%, 70%, 72%, 75%, 77%, 80%, 82%, 85%, 87%, 90%, 92%, 95%, 97%, 98%, 99% identical to SEQ ID NO: 66. In some embodiments, the molecule comprises a polypeptide sequence which is at least 60%, 62%, 65%, 67%, 70%, 72%, 75%, 77%, 80%, 82%, 85%, 87%, 90%, 92%, 95%, 97%, 98%, 99% identical to SEQ ID NOs: 13, a polypeptide sequence which is at least 60%, 62%, 65%, 67%, 70%, 72%, 75%, 77%, 80%, 82%, 85%, 87%, 90%, 92%, 95%, 97%, 98%, 99% identical to SEQ ID NO: 14, a polypeptide sequence which is at least 60%, 62%, 65%, 67%, 70%, 72%, 75%, 77%, 80%, 82%, 85%, 87%, 90%, 92%, 95%, 97%, 98%, 99% identical to SEQ ID NO: 27, and a polypeptide sequence which is at least 60%, 62%, 65%, 67%, 70%, 72%, 75%, 77%, 80%, 82%, 85%, 87%, 90%, 92%, 95%, 97%, 98%, 99% identical to SEQ ID NO: 28.

[0416] In some embodiments, the molecule comprises SEQ ID NOs: 59, 60, 61, and 62. In some embodiments, the molecule comprises SEQ ID NOs: 63, 64, 65, and 66. In some embodiments, the molecule comprises SEQ ID NOs: 13, 14, 27, and 28.

[0417] In some embodiments, the molecule further comprises one or more disulfide bonds. In some embodiments, the molecule further comprises one or more linker sequences. In some embodiments, the molecule is capable of neutralizing a coronavirus. In some embodiments, the coronavirus is a SARS-CoV-2 virus strain. In some embodiments, the molecule specifically recognizes a first epitope and a second epitope on a SARS-CoV-2 particle. In some embodiments, the first epitope comprises at least a portion of a receptor binding domain (RBD) on an S protein of a SARS-CoV-2 particle. In some embodiments, the second epitope comprises at least a portion of a N-terminal domain (NTD) on an S protein of a SARS-CoV-2 particle. In some embodiments, the composition is administered in combination with a second therapeutic agent.

[0418] In certain aspects, the invention provides a synthesized monoclonal antibody, or a functional fragment thereof, comprising a heavy chain having a variable domain and a constant domain and a light chain having a variable domain and a constant domain, wherein the antibody binds an antigen on a coronavirus particle.

[0419] In some embodiments, the heavy chain variable domain comprises a polypeptide sequence which is at least 60%, 62%, 65%, 67%, 70%, 72%, 75%, 77%, 80%, 82%, 85%, 87%, 90%, 92%, 95%, 97%, 98%, 99% identical to SEQ ID NO: 15. In some embodiments, the light chain variable domain comprises a polypeptide sequence which is at least 60%, 62%, 65%, 67%, 70%, 72%, 75%, 77%, 80%, 82%, 85%, 87%, 90%, 92%, 95%, 97%, 98%, 99% identical to SEQ ID NO: 16. In some embodiments, the heavy chain variable domain comprises SEQ ID NO: 15. In some embodiments, the light chain variable domain comprises SEQ ID NO: 16.

[0420] In some embodiments, the antibody comprises a polypeptide sequence which is at least 60%, 62%, 65%, 67%, 70%, 72%, 75%, 77%, 80%, 82%, 85%, 87%, 90%, 92%, 95%, 97%, 98%, 99% identical to SEQ ID NO: 15 and a polypeptide sequence which is at least 60%, 62%, 65%, 67%, 70%, 72%, 75%, 77%, 80%, 82%, 85%, 87%, 90%, 92%, 95%, 97%, 98%, 99% identical to SEQ ID NO: 16. In some embodiments, the antibody comprises SEQ ID NO: 15 and SEQ ID NO: 16.

[0421] In some embodiments, the heavy chain variable domain comprises the CDR1, CDR2, and CDR3 regions of SEQ ID NO: 15. In some embodiments, the light chain variable domain comprises the CDR1, CDR2, and CDR3 regions of SEQ ID NO: 16.

[0422] In some embodiments, the antibody neutralizes a coronavirus. In some embodiments, the coronavirus is SARS-CoV-2. In some embodiments, the antibody specifically binds an epitope on the surface of the coronavirus. In some embodiments, the epitope comprises at least a portion of a coronavirus spike protein. In some embodiments, the at least a portion of a coronavirus spike protein comprises a receptor binding domain (RBD) of a spike protein. In some embodiments, the coronavirus is a SARS-CoV-2 coronavirus.

[0423] In certain aspects, the invention provides a method of treating a COVID-19 infection in a subject in need thereof, the method comprising administering to the subject a therapeutically effective amount of a synthesized monoclonal antibody, or a functional fragment thereof, comprising a heavy chain having a variable domain and a constant domain and a light chain having a variable domain and a constant domain, wherein the antibody binds an antigen on a coronavirus particle.

[0424] In some embodiments, the heavy chain variable domain comprises a polypeptide sequence which is at least 60%, 62%, 65%, 67%, 70%, 72%, 75%, 77%, 80%, 82%, 85%, 87%, 90%, 92%, 95%, 97%, 98%, 99% identical to SEQ ID NO: 15. In some embodiments, the light chain variable domain comprises a polypeptide sequence which is at least 60%, 62%, 65%, 67%, 70%, 72%, 75%, 77%, 80%, 82%, 85%, 87%, 90%, 92%, 95%, 97%, 98%, 99% identical to SEQ ID NO: 16. In some embodiments, the heavy chain variable domain comprises SEQ ID NO: 15. In some embodiments, the light chain variable domain comprises SEQ ID NO: 16.

[0425] In some embodiments, the antibody comprises a polypeptide sequence which is at least 60%, 62%, 65%, 67%, 70%, 72%, 75%, 77%, 80%, 82%, 85%, 87%, 90%, 92%, 95%, 97%, 98%, 99% identical to SEQ ID NO: 15 and a polypeptide sequence which is at least 60%, 62%, 65%, 67%, 70%, 72%, 75%, 77%, 80%, 82%, 85%, 87%, 90%, 92%, 95%, 97%, 98%, 99% identical to SEQ ID NO: 16. In some embodiments, the antibody comprises SEQ ID NO: 15 and SEQ ID NO: 16.

[0426] In some embodiments, the heavy chain variable domain comprises the CDR1, CDR2, and CDR3 regions of SEQ ID NO: 15. In some embodiments, the light chain variable domain comprises the CDR1, CDR2, and CDR3 regions of SEQ ID NO: 16.

[0427] In some embodiments, the antibody neutralizes a coronavirus. In some embodiments, the coronavirus is SARS-CoV-2. In some embodiments, the antibody neutralizes a coronavirus. In some embodiments, the coronavirus is SARS-CoV-2. In some embodiments, the antibody specifically binds an epitope on the surface of the coronavirus. In some embodiments, the epitope comprises at least a portion of a coronavirus spike protein. In some embodiments, the at least a portion of a coronavirus spike protein comprises a receptor binding domain (RBD) of a spike protein. In some embodiments, the coronavirus is a SARS-CoV-2 coronavirus. In some embodiments, the antibody is administered in combination with a second pharmaceutical agent.

[0428] In certain aspects, the invention provides a method of preventing a COVID-19 infection in a subject in need thereof, the method comprising administering to the subject a therapeutically effective amount of a synthesized monoclonal antibody, or a functional fragment thereof, comprising a heavy chain having a variable domain and a constant domain and a light chain having a variable and a constant domain, wherein the antibody binds an antigen on a coronavirus particle.

[0429] In some embodiments, the heavy chain variable domain comprises a polypeptide sequence which is at least 60%, 62%, 65%, 67%, 70%, 72%, 75%, 77%, 80%, 82%, 85%, 87%, 90%, 92%, 95%, 97%, 98%, 99% identical to SEQ ID NO: 15. In some embodiments, the light chain variable domain comprises a polypeptide sequence which is at least 60%, 62%, 65%, 67%, 70%, 72%, 75%, 77%, 80%, 82%, 85%, 87%, 90%, 92%, 95%, 97%, 98%, 99% identical to SEQ ID NO: 16. In some embodiments, the heavy chain variable domain comprises SEQ ID NO: 15. In some embodiments, the light chain variable domain comprises SEQ ID NO: 16.

[0430] In some embodiments, the antibody comprises a polypeptide sequence which is at least 60%, 62%, 65%, 67%, 70%, 72%, 75%, 77%, 80%, 82%, 85%, 87%, 90%, 92%, 95%, 97%, 98%, 99% identical to SEQ ID NO: 15 and a polypeptide sequence which is at least 60%, 62%, 65%, 67%, 70%, 72%, 75%, 77%, 80%, 82%, 85%, 87%, 90%, 92%, 95%, 97%, 98%, 99% identical to SEQ ID NO: 16. In some embodiments, the antibody comprises SEQ ID NO: 15 and SEQ ID NO: 16.

[0431] In some embodiments, the heavy chain variable domain comprises the CDR1, CDR2, and CDR3 regions of SEQ ID NO: 15. In some embodiments, the light chain variable domain comprises the CDR1, CDR2, and CDR3 regions of SEQ ID NO: 16.

[0432] In some embodiments, the antibody neutralizes a coronavirus. In some embodiments, the coronavirus is SARS-CoV-2. In some embodiments, the antibody neutralizes a coronavirus. In some embodiments, the coronavirus is SARS-CoV-2. In some embodiments, the antibody specifically binds an epitope on the surface of the coronavirus. In some embodiments, the epitope comprises at least a portion of a coronavirus spike protein. In some embodiments, the at least a portion of a coronavirus spike protein comprises a receptor binding domain (RBD) of a spike protein. In some embodiments, the coronavirus is a SARS-CoV-2 coronavirus. In some embodiments, the antibody is administered in combination with a second pharmaceutical agent.

[0433] In certain aspects, the invention provides a synthesized monoclonal antibody, or a functional fragment thereof, comprising a heavy chain having a variable domain and a constant domain and a light chain having a variable domain and a constant domain, wherein the antibody binds an antigen on a coronavirus particle.

[0434] In some embodiments, the heavy chain variable domain comprises a polypeptide sequence which is at least 60%, 62%, 65%, 67%, 70%, 72%, 75%, 77%, 80%, 82%, 85%, 87%, 90%, 92%, 95%, 97%, 98%, 99% identical to SEQ ID NO: 3, a polypeptide sequence which is at least 60%, 62%, 65%, 67%, 70%, 72%, 75%, 77%, 80%, 82%, 85%, 87%, 90%, 92%, 95%, 97%, 98%, 99% identical to SEQ ID NO: 7, a polypeptide sequence which is at least 60%, 62%, 65%, 67%, 70%, 72%, 75%, 77%, 80%, 82%, 85%, 87%, 90%, 92%, 95%, 97%, 98%, 99% identical to SEQ ID NO: 9, a polypeptide sequence which is at least 60%, 62%, 65%, 67%, 70%, 72%, 75%, 77%, 80%, 82%, 85%, 87%, 90%, 92%, 95%, 97%, 98%, 99% identical to SEQ ID NO: 11, or a polypeptide sequence which is at least 60%, 62%, 65%, 67%, 70%, 72%, 75%, 77%, 80%, 82%, 85%, 87%, 90%, 92%, 95%, 97%, 98%, 99% identical to SEQ ID NO: 17.

[0435] In some embodiments, the heavy chain variable domain comprises a polypeptide sequence which is at least 60%, 62%, 65%, 67%, 70%, 72%, 75%, 77%, 80%, 82%, 85%, 87%, 90%, 92%, 95%, 97%, 98%, 99% identical to SEQ ID NO: 19, a polypeptide sequence which is at least 60%, 62%, 65%, 67%, 70%, 72%, 75%, 77%, 80%, 82%, 85%, 87%, 90%, 92%, 95%, 97%, 98%, 99% identical to SEQ ID NO: 21, a polypeptide sequence which is at least 60%, 62%, 65%, 67%, 70%, 72%, 75%, 77%, 80%, 82%, 85%, 87%, 90%, 92%, 95%, 97%, 98%, 99% identical to SEQ ID NO: 25, a polypeptide sequence which is at least 60%, 62%, 65%, 67%, 70%, 72%, 75%, 77%, 80%, 82%, 85%, 87%, 90%, 92%, 95%, 97%, 98%, 99% identical to SEQ ID NO: 29, or a polypeptide sequence which is at least 60%, 62%, 65%, 67%, 70%, 72%, 75%, 77%, 80%, 82%, 85%, 87%, 90%, 92%, 95%, 97%, 98%, 99% identical to SEQ ID NO: 31.

[0436] In some embodiments, the heavy chain variable domain comprises a polypeptide sequence which is at least 60%, 62%, 65%, 67%, 70%, 72%, 75%, 77%, 80%, 82%, 85%, 87%, 90%, 92%, 95%, 97%, 98%, 99% identical to SEQ ID NO: 33, a polypeptide sequence which is at least 60%, 62%, 65%, 67%, 70%, 72%, 75%, 77%, 80%, 82%, 85%, 87%, 90%, 92%, 95%, 97%, 98%, 99% identical to SEQ ID NO: 37, a polypeptide sequence which is at least 60%, 62%, 65%, 67%, 70%, 72%, 75%, 77%, 80%, 82%, 85%, 87%, 90%, 92%, 95%, 97%, 98%, 99% identical to SEQ ID NO: 39, a polypeptide sequence which is at least 60%, 62%, 65%, 67%, 70%, 72%, 75%, 77%, 80%, 82%, 85%, 87%, 90%, 92%, 95%, 97%, 98%, 99% identical to SEQ ID NO: 43, or a polypeptide sequence which is at least 60%, 62%, 65%, 67%, 70%, 72%, 75%, 77%, 80%, 82%, 85%, 87%, 90%, 92%, 95%, 97%, 98%, 99% identical to SEQ ID NO: 45.

[0437] In some embodiments, the light chain variable domain comprises a polypeptide sequence which is at least 60%, 62%, 65%, 67%, 70%, 72%, 75%, 77%, 80%, 82%, 85%, 87%, 90%, 92%, 95%, 97%, 98%, 99% identical to SEQ ID NO: 4, a polypeptide sequence which is at least 60%, 62%, 65%, 67%, 70%, 72%, 75%, 77%, 80%, 82%, 85%, 87%, 90%, 92%, 95%, 97%, 98%, 99% identical to SEQ ID NO: 8, a polypeptide sequence which is at least 60%, 62%, 65%, 67%, 70%, 72%, 75%, 77%, 80%, 82%, 85%, 87%, 90%, 92%, 95%, 97%, 98%, 99% identical to SEQ ID NO: 10, a polypeptide sequence which is at least 60%, 62%, 65%, 67%, 70%, 72%, 75%, 77%, 80%, 82%, 85%, 87%, 90%, 92%, 95%, 97%, 98%, 99% identical to SEQ ID NO: 12, a polypeptide sequence which is at least 60%, 62%, 65%, 67%, 70%, 72%, 75%, 77%, 80%, 82%, 85%, 87%, 90%, 92%, 95%, 97%, 98%, 99% identical to SEQ ID NO: 18.

[0438] In some embodiments, the light chain variable domain comprises a polypeptide sequence which is at least 60%, 62%, 65%, 67%, 70%, 72%, 75%, 77%, 80%, 82%, 85%, 87%, 90%, 92%, 95%, 97%, 98%, 99% identical to SEQ ID NO: 20, a polypeptide sequence which is at least 60%, 62%, 65%, 67%, 70%, 72%, 75%, 77%, 80%, 82%, 85%, 87%, 90%, 92%, 95%, 97%, 98%, 99% identical to SEQ ID NO: 22, a polypeptide sequence which is at least 60%, 62%, 65%, 67%, 70%, 72%, 75%, 77%, 80%, 82%, 85%, 87%, 90%, 92%, 95%, 97%, 98%, 99% identical to SEQ ID NO: 26, a polypeptide sequence which is at least 60%, 62%, 65%, 67%, 70%, 72%, 75%, 77%, 80%, 82%, 85%, 87%, 90%, 92%, 95%, 97%, 98%, 99% identical to SEQ ID NO: 30, a polypeptide sequence which is at least 60%, 62%, 65%, 67%, 70%, 72%, 75%, 77%, 80%, 82%, 85%, 87%, 90%, 92%, 95%, 97%, 98%, 99% identical to SEQ ID NO: 32.

[0439] In some embodiments, the light chain variable domain comprises a polypeptide sequence which is at least 60%, 62%, 65%, 67%, 70%, 72%, 75%, 77%, 80%, 82%, 85%, 87%, 90%, 92%, 95%, 97%, 98%, 99% identical to SEQ ID NO: 34, a polypeptide sequence which is at least 60%, 62%, 65%, 67%, 70%, 72%, 75%, 77%, 80%, 82%, 85%, 87%, 90%, 92%, 95%, 97%, 98%, 99% identical to SEQ ID NO: 38, a polypeptide sequence which is at least 60%, 62%, 65%, 67%, 70%, 72%, 75%, 77%, 80%, 82%, 85%, 87%, 90%, 92%, 95%, 97%, 98%, 99% identical to SEQ ID NO: 40, a polypeptide sequence which is at least 60%, 62%, 65%, 67%, 70%, 72%, 75%, 77%, 80%, 82%, 85%, 87%, 90%, 92%, 95%, 97%, 98%, 99% identical to SEQ ID NO: 44, a polypeptide sequence which is at least 60%, 62%, 65%, 67%, 70%, 72%, 75%, 77%, 80%, 82%, 85%, 87%, 90%, 92%, 95%, 97%, 98%, 99% identical to SEQ ID NO: 46.

[0440] In some embodiments, the heavy chain variable domain comprises a polypeptide sequence which is at least 60%, 62%, 65%, 67%, 70%, 72%, 75%, 77%, 80%, 82%, 85%, 87%, 90%, 92%, 95%, 97%, 98%, 99% identical to SEQ ID NO: 3 and the light chain variable domain comprises a polypeptide sequence which is at least 60%, 62%, 65%, 67%, 70%, 72%, 75%, 77%, 80%, 82%, 85%, 87%, 90%, 92%, 95%, 97%, 98%, 99% identical to SEQ ID NO: 4. In some embodiments, the heavy chain variable domain comprises a polypeptide sequence which is at least 60%, 62%, 65%, 67%, 70%, 72%, 75%, 77%, 80%, 82%, 85%, 87%, 90%, 92%, 95%, 97%, 98%, 99% identical to SEQ ID NO: 7 and the light chain variable domain comprises a polypeptide sequence which is at least 60%, 62%, 65%, 67%, 70%, 72%, 75%, 77%, 80%, 82%, 85%, 87%, 90%, 92%, 95%, 97%, 98%, 99% identical to SEQ ID NO: 8. In some embodiments, the heavy chain variable domain comprises a polypeptide sequence which is at least 60%, 62%, 65%, 67%, 70%, 72%, 75%, 77%, 80%, 82%, 85%, 87%, 90%, 92%, 95%, 97%, 98%, 99% identical to SEQ ID NO: 9 and the light chain variable domain comprises a polypeptide sequence which is at least 60%, 62%, 65%, 67%, 70%, 72%, 75%, 77%, 80%, 82%, 85%, 87%, 90%, 92%, 95%, 97%, 98%, 99% identical to SEQ ID NO: 10. In some embodiments, the heavy chain variable domain comprises a polypeptide sequence which is at least 60%, 62%, 65%, 67%, 70%, 72%, 75%, 77%, 80%, 82%, 85%, 87%, 90%, 92%, 95%, 97%, 98%, 99% identical to SEQ ID NO: 11 and the light chain variable domain comprises a polypeptide sequence which is at least 60%, 62%, 65%, 67%, 70%, 72%, 75%, 77%, 80%, 82%, 85%, 87%, 90%, 92%, 95%, 97%, 98%, 99% identical to SEQ ID NO: 12. In some embodiments, the heavy chain variable domain comprises a polypeptide sequence which is at least 60%, 62%, 65%, 67%, 70%, 72%, 75%, 77%, 80%, 82%, 85%, 87%, 90%, 92%, 95%, 97%, 98%, 99% identical to SEQ ID NO: 17 and the light chain variable domain comprises a polypeptide sequence which is at least 60%, 62%, 65%, 67%, 70%, 72%, 75%, 77%, 80%, 82%, 85%, 87%, 90%, 92%, 95%, 97%, 98%, 99% identical to SEQ ID NO: 18. In some embodiments, the heavy chain variable domain comprises a polypeptide sequence which is at least 60%, 62%, 65%, 67%, 70%, 72%, 75%, 77%, 80%, 82%, 85%, 87%, 90%, 92%, 95%, 97%, 98%, 99% identical to SEQ ID NO: 19 and the light chain variable domain comprises a polypeptide sequence which is at least 60%, 62%, 65%, 67%, 70%, 72%, 75%, 77%, 80%, 82%, 85%, 87%, 90%, 92%, 95%, 97%, 98%, 99% identical to SEQ ID NO: 20. In some embodiments, the heavy chain variable domain comprises a polypeptide sequence which is at least 60%, 62%, 65%, 67%, 70%, 72%, 75%, 77%, 80%, 82%, 85%, 87%, 90%, 92%, 95%, 97%, 98%, 99% identical to SEQ ID NO: 21 and the light chain variable domain comprises a polypeptide sequence which is at least 60%, 62%, 65%, 67%, 70%, 72%, 75%, 77%, 80%, 82%, 85%, 87%, 90%, 92%, 95%, 97%, 98%, 99% identical to SEQ ID NO: 22. In some embodiments, the heavy chain variable domain comprises a polypeptide sequence which is at least 60%, 62%, 65%, 67%, 70%, 72%, 75%, 77%, 80%, 82%, 85%, 87%, 90%, 92%, 95%, 97%, 98%, 99% identical to SEQ ID NO: 25 and the light chain variable domain comprises a polypeptide sequence which is at least 60%, 62%, 65%, 67%, 70%, 72%, 75%, 77%, 80%, 82%, 85%, 87%, 90%, 92%, 95%, 97%, 98%, 99% identical to SEQ ID NO: 26. In some embodiments, the heavy chain variable domain comprises a polypeptide sequence which is at least 60%, 62%, 65%, 67%, 70%, 72%, 75%, 77%, 80%, 82%, 85%, 87%, 90%, 92%, 95%, 97%, 98%, 99% identical to SEQ ID NO: 29 and the light chain variable domain comprises a polypeptide sequence which is at least 60%, 62%, 65%, 67%, 70%, 72%, 75%, 77%, 80%, 82%, 85%, 87%, 90%, 92%, 95%, 97%, 98%, 99% identical to SEQ ID NO: 30.

[0441] In some embodiments, the heavy chain variable domain comprises a polypeptide sequence which is at least 60%, 62%, 65%, 67%, 70%, 72%, 75%, 77%, 80%, 82%, 85%, 87%, 90%, 92%, 95%, 97%, 98%, 99% identical to SEQ ID NO: 31 and the light chain variable domain comprises a polypeptide sequence which is at least 60%, 62%, 65%, 67%, 70%, 72%, 75%, 77%, 80%, 82%, 85%, 87%, 90%, 92%, 95%, 97%, 98%, 99% identical to SEQ ID NO: 32. In some embodiments, the heavy chain variable domain comprises a polypeptide sequence which is at least 60%, 62%, 65%, 67%, 70%, 72%, 75%, 77%, 80%, 82%, 85%, 87%, 90%, 92%, 95%, 97%, 98%, 99% identical to SEQ ID NO: 33 and the light chain variable domain comprises a polypeptide sequence which is at least 60%, 62%, 65%, 67%, 70%, 72%, 75%, 77%, 80%, 82%, 85%, 87%, 90%, 92%, 95%, 97%, 98%, 99% identical to SEQ ID NO: 34. In some embodiments, the heavy chain variable domain comprises a polypeptide sequence which is at least 60%, 62%, 65%, 67%, 70%, 72%, 75%, 77%, 80%, 82%, 85%, 87%, 90%, 92%, 95%, 97%, 98%, 99% identical to SEQ ID NO: 37 and the light chain variable domain comprises a polypeptide sequence which is at least 60%, 62%, 65%, 67%, 70%, 72%, 75%, 77%, 80%, 82%, 85%, 87%, 90%, 92%, 95%, 97%, 98%, 99% identical to SEQ ID NO: 38. In some embodiments, the heavy chain variable domain comprises a polypeptide sequence which is at least 60%, 62%, 65%, 67%, 70%, 72%, 75%, 77%, 80%, 82%, 85%, 87%, 90%, 92%, 95%, 97%, 98%, 99% identical to SEQ ID NO: 39 and the light chain variable domain comprises a polypeptide sequence which is at least 60%, 62%, 65%, 67%, 70%, 72%, 75%, 77%, 80%, 82%, 85%, 87%, 90%, 92%, 95%, 97%, 98%, 99% identical to SEQ ID NO: 40. In some embodiments, the heavy chain variable domain comprises a polypeptide sequence which is at least 60%, 62%, 65%, 67%, 70%, 72%, 75%, 77%, 80%, 82%, 85%, 87%, 90%, 92%, 95%, 97%, 98%, 99% identical to SEQ ID NO: 43 and the light chain variable domain comprises a polypeptide sequence which is at least 60%, 62%, 65%, 67%, 70%, 72%, 75%, 77%, 80%, 82%, 85%, 87%, 90%, 92%, 95%, 97%, 98%, 99% identical to SEQ ID NO: 44. In some embodiments, the heavy chain variable domain comprises a polypeptide sequence which is at least 60%, 62%, 65%, 67%, 70%, 72%, 75%, 77%, 80%, 82%, 85%, 87%, 90%, 92%, 95%, 97%, 98%, 99% identical to SEQ ID NO: 45 and the light chain variable domain comprises a polypeptide sequence which is at least 60%, 62%, 65%, 67%, 70%, 72%, 75%, 77%, 80%, 82%, 85%, 87%, 90%, 92%, 95%, 97%, 98%, 99% identical to SEQ ID NO: 46.

[0442] In some embodiments, the heavy chain variable domain comprises SEQ ID NO: 3 and the light chain variable domain comprises SEQ ID NO: 4. In some embodiments, the heavy chain variable domain comprises SEQ ID NO: 7 and the light chain variable domain comprises SEQ ID NO: 8. In some embodiments, the heavy chain variable domain comprises SEQ ID NO: 9 and the light chain variable domain comprises SEQ ID NO: 10. In some embodiments, the heavy chain variable domain comprises SEQ ID NO: 11 and the light chain variable domain comprises SEQ ID NO: 12. In some embodiments, the heavy chain variable domain comprises SEQ ID NO: 17 and the light chain variable domain comprises SEQ ID NO: 18. In some embodiments, the heavy chain variable domain comprises SEQ ID NO: 19 and the light chain variable domain comprises SEQ ID NO: 20. In some embodiments, the heavy chain variable domain comprises SEQ ID NO: 21 and the light chain variable domain comprises SEQ ID NO: 22. In some embodiments, the heavy chain variable domain comprises SEQ ID NO: 25 and the light chain variable domain comprises SEQ ID NO: 26. In some embodiments, the heavy chain variable domain comprises SEQ ID NO: 29 and the light chain variable domain comprises SEQ ID NO: 30. In some embodiments, the heavy chain variable domain comprises SEQ ID NO: 31 and the light chain variable domain comprises SEQ ID NO: 32. In some embodiments, the heavy chain variable domain comprises SEQ ID NO: 33 and the light chain variable domain comprises SEQ ID NO: 34. In some embodiments, the heavy chain variable domain comprises SEQ ID NO: 37 and the light chain variable domain comprises SEQ ID NO: 38. In some embodiments, the heavy chain variable domain comprises SEQ ID NO: 39 and the light chain variable domain comprises SEQ ID NO: 40. In some embodiments, the heavy chain variable domain comprises SEQ ID NO: 43 and the light chain variable domain comprises SEQ ID NO: 44. In some embodiments, the heavy chain variable domain comprises SEQ ID NO: 45 and the light chain variable domain comprises SEQ ID NO: 46.

[0443] In some embodiments, the heavy chain variable domain comprises the CDR1, CDR2, and CDR3 regions of SEQ ID NO: 3; the CDR1, CDR2, and CDR3 regions of SEQ ID NO: 7; the CDR1, CDR2, and CDR3 regions of SEQ ID NO: 9; the CDR1, CDR2, and CDR3 regions of SEQ ID NO: 11; or the CDR1, CDR2, and CDR3 regions of SEQ ID NO: 17. In some embodiments, the heavy chain variable domain comprises the CDR1, CDR2, and CDR3 regions of SEQ ID NO: 19; the CDR1, CDR2, and CDR3 regions of SEQ ID NO: 21; the CDR1, CDR2, and CDR3 regions of SEQ ID NO: 25; the CDR1, CDR2, and CDR3 regions of SEQ ID NO: 29; or the CDR1, CDR2, and CDR3 regions of SEQ ID NO: 31. In some embodiments, the heavy chain variable domain comprises the CDR1, CDR2, and CDR3 regions of SEQ ID NO: 33; the CDR1, CDR2, and CDR3 regions of SEQ ID NO: 37; the CDR1, CDR2, and CDR3 regions of SEQ ID NO: 39; the CDR1, CDR2, and CDR3 regions of SEQ ID NO: 43; or the CDR1, CDR2, and CDR3 regions of SEQ ID NO: 45. In some embodiments, the light chain variable domain comprises the CDR1, CDR2, and CDR3 regions of SEQ ID NO: 4; the CDR1, CDR2, and CDR3 regions of SEQ ID NO: 8; the CDR1, CDR2, and CDR3 regions of SEQ ID NO: 10; the CDR1, CDR2, and CDR3 regions of SEQ ID NO: 12; or the CDR1, CDR2, and CDR3 regions of SEQ ID NO: 18. In some embodiments, the light chain variable domain comprises the CDR1, CDR2, and CDR3 regions of SEQ ID NO: 20; the CDR1, CDR2, and CDR3 regions of SEQ ID NO: 22; the CDR1, CDR2, and CDR3 regions of SEQ ID NO: 26; the CDR1, CDR2, and CDR3 regions of SEQ ID NO: 30; or the CDR1, CDR2, and CDR3 regions of SEQ ID NO: 32. In some embodiments, the light chain variable domain comprises the CDR1, CDR2, and CDR3 regions of SEQ ID NO: 34; the CDR1, CDR2, and CDR3 regions of SEQ ID NO: 38; the CDR1, CDR2, and CDR3 regions of SEQ ID NO: 40; the CDR1, CDR2, and CDR3 regions of SEQ ID NO: 44; or the CDR1, CDR2, and CDR3 regions of SEQ ID NO: 46.

[0444] In some embodiments, the antibody neutralizes a coronavirus. In some embodiments, the coronavirus is a SARS-CoV-2 virus. In some embodiments, the coronavirus is a SARS-CoV-2 variant strain. In some embodiments, the variant strain is selected from the group consisting of WA1, B.1.1.7, B1.526, B1.351, P1, B1.352, and B.1.427.

[0445] In some embodiments, the antibody specifically binds an epitope on the surface of the coronavirus. In some embodiments, the epitope comprises at least a portion of a coronavirus spike protein. In some embodiments, the at least a portion of a coronavirus spike protein comprises a receptor binding domain (RBD) of a spike protein. In some embodiments, the at least a portion of a coronavirus spike protein comprises a N-Terminal domain (NTD) of a spike protein. In some embodiments, the coronavirus is a SARS-CoV-2 coronavirus.

[0446] In certain aspects, the invention provides a method of treating or preventing a COVID-19 infection in a subject in need thereof, the method comprising administering to the subject a therapeutically effective amount of a synthesized monoclonal antibody, or a functional fragment thereof, comprising a heavy chain having a variable domain and a constant domain and a light chain having a variable domain and a constant domain, wherein the antibody binds an antigen on a coronavirus particle.

[0447] In some embodiments, the heavy chain variable domain comprises a polypeptide sequence which is at least 60%, 62%, 65%, 67%, 70%, 72%, 75%, 77%, 80%, 82%, 85%, 87%, 90%, 92%, 95%, 97%, 98%, 99% identical to SEQ ID NO: 3, a polypeptide sequence which is at least 60%, 62%, 65%, 67%, 70%, 72%, 75%, 77%, 80%, 82%, 85%, 87%, 90%, 92%, 95%, 97%, 98%, 99% identical to SEQ ID NO: 7, a polypeptide sequence which is at least 60%, 62%, 65%, 67%, 70%, 72%, 75%, 77%, 80%, 82%, 85%, 87%, 90%, 92%, 95%, 97%, 98%, 99% identical to SEQ ID NO: 9, a polypeptide sequence which is at least 60%, 62%, 65%, 67%, 70%, 72%, 75%, 77%, 80%, 82%, 85%, 87%, 90%, 92%, 95%, 97%, 98%, 99% identical to SEQ ID NO: 11, or a polypeptide sequence which is at least 60%, 62%, 65%, 67%, 70%, 72%, 75%, 77%, 80%, 82%, 85%, 87%, 90%, 92%, 95%, 97%, 98%, 99% identical to SEQ ID NO: 17.

[0448] In some embodiments, the heavy chain variable domain comprises a polypeptide sequence which is at least 60%, 62%, 65%, 67%, 70%, 72%, 75%, 77%, 80%, 82%, 85%, 87%, 90%, 92%, 95%, 97%, 98%, 99% identical to SEQ ID NO: 19, a polypeptide sequence which is at least 60%, 62%, 65%, 67%, 70%, 72%, 75%, 77%, 80%, 82%, 85%, 87%, 90%, 92%, 95%, 97%, 98%, 99% identical to SEQ ID NO: 21, a polypeptide sequence which is at least 60%, 62%, 65%, 67%, 70%, 72%, 75%, 77%, 80%, 82%, 85%, 87%, 90%, 92%, 95%, 97%, 98%, 99% identical to SEQ ID NO: 25, a polypeptide sequence which is at least 60%, 62%, 65%, 67%, 70%, 72%, 75%, 77%, 80%, 82%, 85%, 87%, 90%, 92%, 95%, 97%, 98%, 99% identical to SEQ ID NO: 29, or a polypeptide sequence which is at least 60%, 62%, 65%, 67%, 70%, 72%, 75%, 77%, 80%, 82%, 85%, 87%, 90%, 92%, 95%, 97%, 98%, 99% identical to SEQ ID NO: 31.

[0449] In some embodiments, the heavy chain variable domain comprises a polypeptide sequence which is at least 60%, 62%, 65%, 67%, 70%, 72%, 75%, 77%, 80%, 82%, 85%, 87%, 90%, 92%, 95%, 97%, 98%, 99% identical to SEQ ID NO: 33, a polypeptide sequence which is at least 60%, 62%, 65%, 67%, 70%, 72%, 75%, 77%, 80%, 82%, 85%, 87%, 90%, 92%, 95%, 97%, 98%, 99% identical to SEQ ID NO: 37, a polypeptide sequence which is at least 60%, 62%, 65%, 67%, 70%, 72%, 75%, 77%, 80%, 82%, 85%, 87%, 90%, 92%, 95%, 97%, 98%, 99% identical to SEQ ID NO: 39, a polypeptide sequence which is at least 60%, 62%, 65%, 67%, 70%, 72%, 75%, 77%, 80%, 82%, 85%, 87%, 90%, 92%, 95%, 97%, 98%, 99% identical to SEQ ID NO: 43, or a polypeptide sequence which is at least 60%, 62%, 65%, 67%, 70%, 72%, 75%, 77%, 80%, 82%, 85%, 87%, 90%, 92%, 95%, 97%, 98%, 99% identical to SEQ ID NO: 45.

[0450] In some embodiments, the light chain variable domain comprises a polypeptide sequence which is at least 60%, 62%, 65%, 67%, 70%, 72%, 75%, 77%, 80%, 82%, 85%, 87%, 90%, 92%, 95%, 97%, 98%, 99% identical to SEQ ID NO: 4, a polypeptide sequence which is at least 60%, 62%, 65%, 67%, 70%, 72%, 75%, 77%, 80%, 82%, 85%, 87%, 90%, 92%, 95%, 97%, 98%, 99% identical to SEQ ID NO: 8, a polypeptide sequence which is at least 60%, 62%, 65%, 67%, 70%, 72%, 75%, 77%, 80%, 82%, 85%, 87%, 90%, 92%, 95%, 97%, 98%, 99% identical to SEQ ID NO: 10, a polypeptide sequence which is at least 60%, 62%, 65%, 67%, 70%, 72%, 75%, 77%, 80%, 82%, 85%, 87%, 90%, 92%, 95%, 97%, 98%, 99% identical to SEQ ID NO: 12, a polypeptide sequence which is at least 60%, 62%, 65%, 67%, 70%, 72%, 75%, 77%, 80%, 82%, 85%, 87%, 90%, 92%, 95%, 97%, 98%, 99% identical to SEQ ID NO: 18.

[0451] In some embodiments, the light chain variable domain comprises a polypeptide sequence which is at least 60%, 62%, 65%, 67%, 70%, 72%, 75%, 77%, 80%, 82%, 85%, 87%, 90%, 92%, 95%, 97%, 98%, 99% identical to SEQ ID NO: 20, a polypeptide sequence which is at least 60%, 62%, 65%, 67%, 70%, 72%, 75%, 77%, 80%, 82%, 85%, 87%, 90%, 92%, 95%, 97%, 98%, 99% identical to SEQ ID NO: 22, a polypeptide sequence which is at least 60%, 62%, 65%, 67%, 70%, 72%, 75%, 77%, 80%, 82%, 85%, 87%, 90%, 92%, 95%, 97%, 98%, 99% identical to SEQ ID NO: 26, a polypeptide sequence which is at least 60%, 62%, 65%, 67%, 70%, 72%, 75%, 77%, 80%, 82%, 85%, 87%, 90%, 92%, 95%, 97%, 98%, 99% identical to SEQ ID NO: 30, a polypeptide sequence which is at least 60%, 62%, 65%, 67%, 70%, 72%, 75%, 77%, 80%, 82%, 85%, 87%, 90%, 92%, 95%, 97%, 98%, 99% identical to SEQ ID NO: 32.

[0452] In some embodiments, the light chain variable domain comprises a polypeptide sequence which is at least 60%, 62%, 65%, 67%, 70%, 72%, 75%, 77%, 80%, 82%, 85%, 87%, 90%, 92%, 95%, 97%, 98%, 99% identical to SEQ ID NO: 34, a polypeptide sequence which is at least 60%, 62%, 65%, 67%, 70%, 72%, 75%, 77%, 80%, 82%, 85%, 87%, 90%, 92%, 95%, 97%, 98%, 99% identical to SEQ ID NO: 38, a polypeptide sequence which is at least 60%, 62%, 65%, 67%, 70%, 72%, 75%, 77%, 80%, 82%, 85%, 87%, 90%, 92%, 95%, 97%, 98%, 99% identical to SEQ ID NO: 40, a polypeptide sequence which is at least 60%, 62%, 65%, 67%, 70%, 72%, 75%, 77%, 80%, 82%, 85%, 87%, 90%, 92%, 95%, 97%, 98%, 99% identical to SEQ ID NO: 44, a polypeptide sequence which is at least 60%, 62%, 65%, 67%, 70%, 72%, 75%, 77%, 80%, 82%, 85%, 87%, 90%, 92%, 95%, 97%, 98%, 99% identical to SEQ ID NO: 46.

[0453] In some embodiments, the heavy chain variable domain comprises a polypeptide sequence which is at least 60%, 62%, 65%, 67%, 70%, 72%, 75%, 77%, 80%, 82%, 85%, 87%, 90%, 92%, 95%, 97%, 98%, 99% identical to SEQ ID NO: 3 and the light chain variable domain comprises a polypeptide sequence which is at least 60%, 62%, 65%, 67%, 70%, 72%, 75%, 77%, 80%, 82%, 85%, 87%, 90%, 92%, 95%, 97%, 98%, 99% identical to SEQ ID NO: 4. In some embodiments, the heavy chain variable domain comprises a polypeptide sequence which is at least 60%, 62%, 65%, 67%, 70%, 72%, 75%, 77%, 80%, 82%, 85%, 87%, 90%, 92%, 95%, 97%, 98%, 99% identical to SEQ ID NO: 7 and the light chain variable domain comprises a polypeptide sequence which is at least 60%, 62%, 65%, 67%, 70%, 72%, 75%, 77%, 80%, 82%, 85%, 87%, 90%, 92%, 95%, 97%, 98%, 99% identical to SEQ ID NO: 8. In some embodiments, the heavy chain variable domain comprises a polypeptide sequence which is at least 60%, 62%, 65%, 67%, 70%, 72%, 75%, 77%, 80%, 82%, 85%, 87%, 90%, 92%, 95%, 97%, 98%, 99% identical to SEQ ID NO: 9 and the light chain variable domain comprises a polypeptide sequence which is at least 60%, 62%, 65%, 67%, 70%, 72%, 75%, 77%, 80%, 82%, 85%, 87%, 90%, 92%, 95%, 97%, 98%, 99% identical to SEQ ID NO: 10. In some embodiments, the heavy chain variable domain comprises a polypeptide sequence which is at least 60%, 62%, 65%, 67%, 70%, 72%, 75%, 77%, 80%, 82%, 85%, 87%, 90%, 92%, 95%, 97%, 98%, 99% identical to SEQ ID NO: 11 and the light chain variable domain comprises a polypeptide sequence which is at least 60%, 62%, 65%, 67%, 70%, 72%, 75%, 77%, 80%, 82%, 85%, 87%, 90%, 92%, 95%, 97%, 98%, 99% identical to SEQ ID NO: 12. In some embodiments, the heavy chain variable domain comprises a polypeptide sequence which is at least 60%, 62%, 65%, 67%, 70%, 72%, 75%, 77%, 80%, 82%, 85%, 87%, 90%, 92%, 95%, 97%, 98%, 99% identical to SEQ ID NO: 17 and the light chain variable domain comprises a polypeptide sequence which is at least 60%, 62%, 65%, 67%, 70%, 72%, 75%, 77%, 80%, 82%, 85%, 87%, 90%, 92%, 95%, 97%, 98%, 99% identical to SEQ ID NO: 18. In some embodiments, the heavy chain variable domain comprises a polypeptide sequence which is at least 60%, 62%, 65%, 67%, 70%, 72%, 75%, 77%, 80%, 82%, 85%, 87%, 90%, 92%, 95%, 97%, 98%, 99% identical to SEQ ID NO: 19 and the light chain variable domain comprises a polypeptide sequence which is at least 60%, 62%, 65%, 67%, 70%, 72%, 75%, 77%, 80%, 82%, 85%, 87%, 90%, 92%, 95%, 97%, 98%, 99% identical to SEQ ID NO: 20.

[0454] In some embodiments, the heavy chain variable domain comprises a polypeptide sequence which is at least 60%, 62%, 65%, 67%, 70%, 72%, 75%, 77%, 80%, 82%, 85%, 87%, 90%, 92%, 95%, 97%, 98%, 99% identical to SEQ ID NO: 21 and the light chain variable domain comprises a polypeptide sequence which is at least 60%, 62%, 65%, 67%, 70%, 72%, 75%, 77%, 80%, 82%, 85%, 87%, 90%, 92%, 95%, 97%, 98%, 99% identical to SEQ ID NO: 22. In some embodiments, the heavy chain variable domain comprises a polypeptide sequence which is at least 60%, 62%, 65%, 67%, 70%, 72%, 75%, 77%, 80%, 82%, 85%, 87%, 90%, 92%, 95%, 97%, 98%, 99% identical to SEQ ID NO: 25 and the light chain variable domain comprises a polypeptide sequence which is at least 60%, 62%, 65%, 67%, 70%, 72%, 75%, 77%, 80%, 82%, 85%, 87%, 90%, 92%, 95%, 97%, 98%, 99% identical to SEQ ID NO: 26. In some embodiments, the heavy chain variable domain comprises a polypeptide sequence which is at least 60%, 62%, 65%, 67%, 70%, 72%, 75%, 77%, 80%, 82%, 85%, 87%, 90%, 92%, 95%, 97%, 98%, 99% identical to SEQ ID NO: 29 and the light chain variable domain comprises a polypeptide sequence which is at least 60%, 62%, 65%, 67%, 70%, 72%, 75%, 77%, 80%, 82%, 85%, 87%, 90%, 92%, 95%, 97%, 98%, 99% identical to SEQ ID NO: 30. In some embodiments, the heavy chain variable domain comprises a polypeptide sequence which is at least 60%, 62%, 65%, 67%, 70%, 72%, 75%, 77%, 80%, 82%, 85%, 87%, 90%, 92%, 95%, 97%, 98%, 99% identical to SEQ ID NO: 31 and the light chain variable domain comprises a polypeptide sequence which is at least 60%, 62%, 65%, 67%, 70%, 72%, 75%, 77%, 80%, 82%, 85%, 87%, 90%, 92%, 95%, 97%, 98%, 99% identical to SEQ ID NO: 32. In some embodiments, the heavy chain variable domain comprises a polypeptide sequence which is at least 60%, 62%, 65%, 67%, 70%, 72%, 75%, 77%, 80%, 82%, 85%, 87%, 90%, 92%, 95%, 97%, 98%, 99% identical to SEQ ID NO: 33 and the light chain variable domain comprises a polypeptide sequence which is at least 60%, 62%, 65%, 67%, 70%, 72%, 75%, 77%, 80%, 82%, 85%, 87%, 90%, 92%, 95%, 97%, 98%, 99% identical to SEQ ID NO: 34. In some embodiments, the heavy chain variable domain comprises a polypeptide sequence which is at least 60%, 62%, 65%, 67%, 70%, 72%, 75%, 77%, 80%, 82%, 85%, 87%, 90%, 92%, 95%, 97%, 98%, 99% identical to SEQ ID NO: 37 and the light chain variable domain comprises a polypeptide sequence which is at least 60%, 62%, 65%, 67%, 70%, 72%, 75%, 77%, 80%, 82%, 85%, 87%, 90%, 92%, 95%, 97%, 98%, 99% identical to SEQ ID NO: 38.

[0455] In some embodiments, the heavy chain variable domain comprises a polypeptide sequence which is at least 60%, 62%, 65%, 67%, 70%, 72%, 75%, 77%, 80%, 82%, 85%, 87%, 90%, 92%, 95%, 97%, 98%, 99% identical to SEQ ID NO: 39 and the light chain variable domain comprises a polypeptide sequence which is at least 60%, 62%, 65%, 67%, 70%, 72%, 75%, 77%, 80%, 82%, 85%, 87%, 90%, 92%, 95%, 97%, 98%, 99% identical to SEQ ID NO: 40. In some embodiments, the heavy chain variable domain comprises a polypeptide sequence which is at least 60%, 62%, 65%, 67%, 70%, 72%, 75%, 77%, 80%, 82%, 85%, 87%, 90%, 92%, 95%, 97%, 98%, 99% identical to SEQ ID NO: 43 and the light chain variable domain comprises a polypeptide sequence which is at least 60%, 62%, 65%, 67%, 70%, 72%, 75%, 77%, 80%, 82%, 85%, 87%, 90%, 92%, 95%, 97%, 98%, 99% identical to SEQ ID NO: 44. In some embodiments, the heavy chain variable domain comprises a polypeptide sequence which is at least 60%, 62%, 65%, 67%, 70%, 72%, 75%, 77%, 80%, 82%, 85%, 87%, 90%, 92%, 95%, 97%, 98%, 99% identical to SEQ ID NO: 45 and the light chain variable domain comprises a polypeptide sequence which is at least 60%, 62%, 65%, 67%, 70%, 72%, 75%, 77%, 80%, 82%, 85%, 87%, 90%, 92%, 95%, 97%, 98%, 99% identical to SEQ ID NO: 46.

[0456] In some embodiments, the heavy chain variable domain comprises SEQ ID NO: 3 and the light chain variable domain comprises SEQ ID NO: 4. In some embodiments, the heavy chain variable domain comprises SEQ ID NO: 7 and the light chain variable domain comprises SEQ ID NO: 8. In some embodiments, the heavy chain variable domain comprises SEQ ID NO: 9 and the light chain variable domain comprises SEQ ID NO: 10. In some embodiments, the heavy chain variable domain comprises SEQ ID NO: 11 and the light chain variable domain comprises SEQ ID NO: 12. In some embodiments, the heavy chain variable domain comprises SEQ ID NO: 17 and the light chain variable domain comprises SEQ ID NO: 18. In some embodiments, the heavy chain variable domain comprises SEQ ID NO: 19 and the light chain variable domain comprises SEQ ID NO: 20. In some embodiments, the heavy chain variable domain comprises SEQ ID NO: 21 and the light chain variable domain comprises SEQ ID NO: 22. In some embodiments, the heavy chain variable domain comprises SEQ ID NO: 25 and the light chain variable domain comprises SEQ ID NO: 26. In some embodiments, the heavy chain variable domain comprises SEQ ID NO: 29 and the light chain variable domain comprises SEQ ID NO: 30. In some embodiments, the heavy chain variable domain comprises SEQ ID NO: 31 and the light chain variable domain comprises SEQ ID NO: 32. In some embodiments, the heavy chain variable domain comprises SEQ ID NO: 33 and the light chain variable domain comprises SEQ ID NO: 34. In some embodiments, the heavy chain variable domain comprises SEQ ID NO: 37 and the light chain variable domain comprises SEQ ID NO: 38. In some embodiments, the heavy chain variable domain comprises SEQ ID NO: 39 and the light chain variable domain comprises SEQ ID NO: 40. In some embodiments, the heavy chain variable domain comprises SEQ ID NO: 43 and the light chain variable domain comprises SEQ ID NO: 44. In some embodiments, the heavy chain variable domain comprises SEQ ID NO: 45 and the light chain variable domain comprises SEQ ID NO: 46.

[0457] In some embodiments, the heavy chain variable domain comprises the CDR1, CDR2, and CDR3 regions of SEQ ID NO: 3; the CDR1, CDR2, and CDR3 regions of SEQ ID NO: 7; the CDR1, CDR2, and CDR3 regions of SEQ ID NO: 9; the CDR1, CDR2, and CDR3 regions of SEQ ID NO: 11; or the CDR1, CDR2, and CDR3 regions of SEQ ID NO: 17. In some embodiments, the heavy chain variable domain comprises the CDR1, CDR2, and CDR3 regions of SEQ ID NO: 19; the CDR1, CDR2, and CDR3 regions of SEQ ID NO: 21; the CDR1, CDR2, and CDR3 regions of SEQ ID NO: 25; the CDR1, CDR2, and CDR3 regions of SEQ ID NO: 29; or the CDR1, CDR2, and CDR3 regions of SEQ ID NO: 31. In some embodiments, the heavy chain variable domain comprises the CDR1, CDR2, and CDR3 regions of SEQ ID NO: 33; the CDR1, CDR2, and CDR3 regions of SEQ ID NO: 37; the CDR1, CDR2, and CDR3 regions of SEQ ID NO: 39; the CDR1, CDR2, and CDR3 regions of SEQ ID NO: 43; or the CDR1, CDR2, and CDR3 regions of SEQ ID NO: 45. In some embodiments, the light chain variable domain comprises the CDR1, CDR2, and CDR3 regions of SEQ ID NO: 4; the CDR1, CDR2, and CDR3 regions of SEQ ID NO: 8; the CDR1, CDR2, and CDR3 regions of SEQ ID NO: 10; the CDR1, CDR2, and CDR3 regions of SEQ ID NO: 12; or the CDR1, CDR2, and CDR3 regions of SEQ ID NO: 18. In some embodiments, the light chain variable domain comprises the CDR1, CDR2, and CDR3 regions of SEQ ID NO: 20; the CDR1, CDR2, and CDR3 regions of SEQ ID NO: 22; the CDR1, CDR2, and CDR3 regions of SEQ ID NO: 26; the CDR1, CDR2, and CDR3 regions of SEQ ID NO: 30; or the CDR1, CDR2, and CDR3 regions of SEQ ID NO: 32. In some embodiments, the light chain variable domain comprises the CDR1, CDR2, and CDR3 regions of SEQ ID NO: 34; the CDR1, CDR2, and CDR3 regions of SEQ ID NO: 38; the CDR1, CDR2, and CDR3 regions of SEQ ID NO: 40; the CDR1, CDR2, and CDR3 regions of SEQ ID NO: 44; or the CDR1, CDR2, and CDR3 regions of SEQ ID NO: 46.

[0458] In some embodiments, the antibody neutralizes a coronavirus. In some embodiments, the coronavirus is a SARS-CoV-2 virus. In some embodiments, the coronavirus is a SARS-CoV-2 variant strain. In some embodiments, the variant strain is selected from the group consisting of WA1, B.1.1.7, B1.526, B1.351, P1, B1.352, and B.1.427.

[0459] In some embodiments, the antibody specifically binds an epitope on the surface of the coronavirus. In some embodiments, the epitope comprises at least a portion of a coronavirus spike protein. In some embodiments, the at least a portion of a coronavirus spike protein comprises a receptor binding domain (RBD) of a spike protein. In some embodiments, the at least a portion of a coronavirus spike protein comprises a N-Terminal domain (NTD) of a spike protein. In some embodiments, the coronavirus is a SARS-CoV-2 coronavirus. In some embodiments, the composition is administered in combination with a second therapeutic agent.

[0460] In certain aspects, the invention provides a bispecific molecule comprising a first polypeptide chain and a second polypeptide chain, wherein: the first polypeptide chain comprises: a first light chain comprising a variable domain and a constant domain; a first heavy chain comprising a variable domain and a constant domain; the second polypeptide chain comprises: a second light chain comprising a variable domain and a constant domain; and a second heavy chain comprising a variable domain and a constant domain.

[0461] In some embodiments, the first polypeptide chain and the second polypeptide chain are covalently bonded to one another. In some embodiments, the first heavy chain comprises a polypeptide sequence which is at least 60%, 62%, 65%, 67%, 70%, 72%, 75%, 77%, 80%, 82%, 85%, 87%, 90%, 92%, 95%, 97%, 98%, 99% identical to SEQ ID NO: 51, a polypeptide sequence which is at least 60%, 62%, 65%, 67%, 70%, 72%, 75%, 77%, 80%, 82%, 85%, 87%, 90%, 92%, 95%, 97%, 98%, 99% identical to SEQ ID NO: 55, a polypeptide sequence which is at least 60%, 62%, 65%, 67%, 70%, 72%, 75%, 77%, 80%, 82%, 85%, 87%, 90%, 92%, 95%, 97%, 98%, 99% identical to SEQ ID NO: 67, a polypeptide sequence which is at least 60%, 62%, 65%, 67%, 70%, 72%, 75%, 77%, 80%, 82%, 85%, 87%, 90%, 92%, 95%, 97%, 98%, 99% identical to SEQ ID NO: 71, a polypeptide sequence which is at least 60%, 62%, 65%, 67%, 70%, 72%, 75%, 77%, 80%, 82%, 85%, 87%, 90%, 92%, 95%, 97%, 98%, 99% identical to SEQ ID NO: 75, a polypeptide sequence which is at least 60%, 62%, 65%, 67%, 70%, 72%, 75%, 77%, 80%, 82%, 85%, 87%, 90%, 92%, 95%, 97%, 98%, 99% identical to SEQ ID NO: 79, a polypeptide sequence which is at least 60%, 62%, 65%, 67%, 70%, 72%, 75%, 77%, 80%, 82%, 85%, 87%, 90%, 92%, 95%, 97%, 98%, 99% identical to SEQ ID NO: 83, a polypeptide sequence which is at least 60%, 62%, 65%, 67%, 70%, 72%, 75%, 77%, 80%, 82%, 85%, 87%, 90%, 92%, 95%, 97%, 98%, 99% identical to SEQ ID NO: 87, a polypeptide sequence which is at least 60%, 62%, 65%, 67%, 70%, 72%, 75%, 77%, 80%, 82%, 85%, 87%, 90%, 92%, 95%, 97%, 98%, 99% identical to SEQ ID NO: 91, a polypeptide sequence which is at least 60%, 62%, 65%, 67%, 70%, 72%, 75%, 77%, 80%, 82%, 85%, 87%, 90%, 92%, 95%, 97%, 98%, 99% identical to SEQ ID NO: 95, a polypeptide sequence which is at least 60%, 62%, 65%, 67%, 70%, 72%, 75%, 77%, 80%, 82%, 85%, 87%, 90%, 92%, 95%, 97%, 98%, 99% identical to SEQ ID NO: 99, a polypeptide sequence which is at least 60%, 62%, 65%, 67%, 70%, 72%, 75%, 77%, 80%, 82%, 85%, 87%, 90%, 92%, 95%, 97%, 98%, 99% identical to SEQ ID NO: 103, a polypeptide sequence which is at least 60%, 62%, 65%, 67%, 70%, 72%, 75%, 77%, 80%, 82%, 85%, 87%, 90%, 92%, 95%, 97%, 98%, 99% identical to SEQ ID NO: 107, a polypeptide sequence which is at least 60%, 62%, 65%, 67%, 70%, 72%, 75%, 77%, 80%, 82%, 85%, 87%, 90%, 92%, 95%, 97%, 98%, 99% identical to SEQ ID NO: 115, a polypeptide sequence which is at least 60%, 62%, 65%, 67%, 70%, 72%, 75%, 77%, 80%, 82%, 85%, 87%, 90%, 92%, 95%, 97%, 98%, 99% identical to SEQ ID NO: 119, a polypeptide sequence which is at least 60%, 62%, 65%, 67%, 70%, 72%, 75%, 77%, 80%, 82%, 85%, 87%, 90%, 92%, 95%, 97%, 98%, 99% identical to SEQ ID NO: 123, a polypeptide sequence which is at least 60%, 62%, 65%, 67%, 70%, 72%, 75%, 77%, 80%, 82%, 85%, 87%, 90%, 92%, 95%, 97%, 98%, 99% identical to SEQ ID NO: 127, a polypeptide sequence which is at least 60%, 62%, 65%, 67%, 70%, 72%, 75%, 77%, 80%, 82%, 85%, 87%, 90%, 92%, 95%, 97%, 98%, 99% identical to SEQ ID NO: 131, a polypeptide sequence which is at least 60%, 62%, 65%, 67%, 70%, 72%, 75%, 77%, 80%, 82%, 85%, 87%, 90%, 92%, 95%, 97%, 98%, 99% identical to SEQ ID NO: 139, a polypeptide sequence which is at least 60%, 62%, 65%, 67%, 70%, 72%, 75%, 77%, 80%, 82%, 85%, 87%, 90%, 92%, 95%, 97%, 98%, 99% identical to SEQ ID NO: 143, a polypeptide sequence which is at least 60%, 62%, 65%, 67%, 70%, 72%, 75%, 77%, 80%, 82%, 85%, 87%, 90%, 92%, 95%, 97%, 98%, 99% identical to SEQ ID NO: 147, a polypeptide sequence which is at least 60%, 62%, 65%, 67%, 70%, 72%, 75%, 77%, 80%, 82%, 85%, 87%, 90%, 92%, 95%, 97%, 98%, 99% identical to SEQ ID NO: 151, a polypeptide sequence which is at least 60%, 62%, 65%, 67%, 70%, 72%, 75%, 77%, 80%, 82%, 85%, 87%, 90%, 92%, 95%, 97%, 98%, 99% identical to SEQ ID NO: 155, a polypeptide sequence which is at least 60%, 62%, 65%, 67%, 70%, 72%, 75%, 77%, 80%, 82%, 85%, 87%, 90%, 92%, 95%, 97%, 98%, 99% identical to SEQ ID NO: 159, a polypeptide sequence which is at least 60%, 62%, 65%, 67%, 70%, 72%, 75%, 77%, 80%, 82%, 85%, 87%, 90%, 92%, 95%, 97%, 98%, 99% identical to SEQ ID NO: 163, a polypeptide sequence which is at least 60%, 62%, 65%, 67%, 70%, 72%, 75%, 77%, 80%, 82%, 85%, 87%, 90%, 92%, 95%, 97%, 98%, 99% identical to SEQ ID NO: 167, a polypeptide sequence which is at least 60%, 62%, 65%, 67%, 70%, 72%, 75%, 77%, 80%, 82%, 85%, 87%, 90%, 92%, 95%, 97%, 98%, 99% identical to SEQ ID NO: 171, a polypeptide sequence which is at least 60%, 62%, 65%, 67%, 70%, 72%, 75%, 77%, 80%, 82%, 85%, 87%, 90%, 92%, 95%, 97%, 98%, 99% identical to SEQ ID NO: 175, a polypeptide sequence which is at least 60%, 62%, 65%, 67%, 70%, 72%, 75%, 77%, 80%, 82%, 85%, 87%, 90%, 92%, 95%, 97%, 98%, 99% identical to SEQ ID NO: 179, or a polypeptide sequence which is at least 60%, 62%, 65%, 67%, 70%, 72%, 75%, 77%, 80%, 82%, 85%, 87%, 90%, 92%, 95%, 97%, 98%, 99% identical to SEQ ID NO:183.

[0462] In some embodiments, the first light chain comprises a polypeptide sequence which is at least 60%, 62%, 65%, 67%, 70%, 72%, 75%, 77%, 80%, 82%, 85%, 87%, 90%, 92%, 95%, 97%, 98%, 99% identical to SEQ ID NO: 52, a polypeptide sequence which is at least 60%, 62%, 65%, 67%, 70%, 72%, 75%, 77%, 80%, 82%, 85%, 87%, 90%, 92%, 95%, 97%, 98%, 99% identical to SEQ ID NO: 56, a polypeptide sequence which is at least 60%, 62%, 65%, 67%, 70%, 72%, 75%, 77%, 80%, 82%, 85%, 87%, 90%, 92%, 95%, 97%, 98%, 99% identical to SEQ ID NO: 68; a polypeptide sequence which is at least 60%, 62%, 65%, 67%, 70%, 72%, 75%, 77%, 80%, 82%, 85%, 87%, 90%, 92%, 95%, 97%, 98%, 99% identical to SEQ ID NO: 72, a polypeptide sequence which is at least 60%, 62%, 65%, 67%, 70%, 72%, 75%, 77%, 80%, 82%, 85%, 87%, 90%, 92%, 95%, 97%, 98%, 99% identical to SEQ ID NO: 76, a polypeptide sequence which is at least 60%, 62%, 65%, 67%, 70%, 72%, 75%, 77%, 80%, 82%, 85%, 87%, 90%, 92%, 95%, 97%, 98%, 99% identical to SEQ ID NO: 80, a polypeptide sequence which is at least 60%, 62%, 65%, 67%, 70%, 72%, 75%, 77%, 80%, 82%, 85%, 87%, 90%, 92%, 95%, 97%, 98%, 99% identical to SEQ ID NO: 84, a polypeptide sequence which is at least 60%, 62%, 65%, 67%, 70%, 72%, 75%, 77%, 80%, 82%, 85%, 87%, 90%, 92%, 95%, 97%, 98%, 99% identical to SEQ ID NO: 88, a polypeptide sequence which is at least 60%, 62%, 65%, 67%, 70%, 72%, 75%, 77%, 80%, 82%, 85%, 87%, 90%, 92%, 95%, 97%, 98%, 99% identical to SEQ ID NO: 92, a polypeptide sequence which is at least 60%, 62%, 65%, 67%, 70%, 72%, 75%, 77%, 80%, 82%, 85%, 87%, 90%, 92%, 95%, 97%, 98%, 99% identical to SEQ ID NO: 96, a polypeptide sequence which is at least 60%, 62%, 65%, 67%, 70%, 72%, 75%, 77%, 80%, 82%, 85%, 87%, 90%, 92%, 95%, 97%, 98%, 99% identical to SEQ ID NO: 100, a polypeptide sequence which is at least 60%, 62%, 65%, 67%, 70%, 72%, 75%, 77%, 80%, 82%, 85%, 87%, 90%, 92%, 95%, 97%, 98%, 99% identical to SEQ ID NO: 104, a polypeptide sequence which is at least 60%, 62%, 65%, 67%, 70%, 72%, 75%, 77%, 80%, 82%, 85%, 87%, 90%, 92%, 95%, 97%, 98%, 99% identical to SEQ ID NO: 108, a polypeptide sequence which is at least 60%, 62%, 65%, 67%, 70%, 72%, 75%, 77%, 80%, 82%, 85%, 87%, 90%, 92%, 95%, 97%, 98%, 99% identical to SEQ ID NO: 116, a polypeptide sequence which is at least 60%, 62%, 65%, 67%, 70%, 72%, 75%, 77%, 80%, 82%, 85%, 87%, 90%, 92%, 95%, 97%, 98%, 99% identical to SEQ ID NO: 120, a polypeptide sequence which is at least 60%, 62%, 65%, 67%, 70%, 72%, 75%, 77%, 80%, 82%, 85%, 87%, 90%, 92%, 95%, 97%, 98%, 99% identical to SEQ ID NO: 124, a polypeptide sequence which is at least 60%, 62%, 65%, 67%, 70%, 72%, 75%, 77%, 80%, 82%, 85%, 87%, 90%, 92%, 95%, 97%, 98%, 99% identical to SEQ ID NO: 128, a polypeptide sequence which is at least 60%, 62%, 65%, 67%, 70%, 72%, 75%, 77%, 80%, 82%, 85%, 87%, 90%, 92%, 95%, 97%, 98%, 99% identical to SEQ ID NO: 132, a polypeptide sequence which is at least 60%, 62%, 65%, 67%, 70%, 72%, 75%, 77%, 80%, 82%, 85%, 87%, 90%, 92%, 95%, 97%, 98%, 99% identical to SEQ ID NO: 140, a polypeptide sequence which is at least 60%, 62%, 65%, 67%, 70%, 72%, 75%, 77%, 80%, 82%, 85%, 87%, 90%, 92%, 95%, 97%, 98%, 99% identical to SEQ ID NO: 144, a polypeptide sequence which is at least 60%, 62%, 65%, 67%, 70%, 72%, 75%, 77%, 80%, 82%, 85%, 87%, 90%, 92%, 95%, 97%, 98%, 99% identical to SEQ ID NO: 148, a polypeptide sequence which is at least 60%, 62%, 65%, 67%, 70%, 72%, 75%, 77%, 80%, 82%, 85%, 87%, 90%, 92%, 95%, 97%, 98%, 99% identical to SEQ ID NO: 152, a polypeptide sequence which is at least 60%, 62%, 65%, 67%, 70%, 72%, 75%, 77%, 80%, 82%, 85%, 87%, 90%, 92%, 95%, 97%, 98%, 99% identical to SEQ ID NO: 156, a polypeptide sequence which is at least 60%, 62%, 65%, 67%, 70%, 72%, 75%, 77%, 80%, 82%, 85%, 87%, 90%, 92%, 95%, 97%, 98%, 99% identical to SEQ ID NO: 160, a polypeptide sequence which is at least 60%, 62%, 65%, 67%, 70%, 72%, 75%, 77%, 80%, 82%, 85%, 87%, 90%, 92%, 95%, 97%, 98%, 99% identical to SEQ ID NO: 164, a polypeptide sequence which is at least 60%, 62%, 65%, 67%, 70%, 72%, 75%, 77%, 80%, 82%, 85%, 87%, 90%, 92%, 95%, 97%, 98%, 99% identical to SEQ ID NO: 168, a polypeptide sequence which is at least 60%, 62%, 65%, 67%, 70%, 72%, 75%, 77%, 80%, 82%, 85%, 87%, 90%, 92%, 95%, 97%, 98%, 99% identical to SEQ ID NO: 172, a polypeptide sequence which is at least 60%, 62%, 65%, 67%, 70%, 72%, 75%, 77%, 80%, 82%, 85%, 87%, 90%, 92%, 95%, 97%, 98%, 99% identical to SEQ ID NO: 176, a polypeptide sequence which is at least 60%, 62%, 65%, 67%, 70%, 72%, 75%, 77%, 80%, 82%, 85%, 87%, 90%, 92%, 95%, 97%, 98%, 99% identical to SEQ ID NO: 180, or a polypeptide sequence which is at least 60%, 62%, 65%, 67%, 70%, 72%, 75%, 77%, 80%, 82%, 85%, 87%, 90%, 92%, 95%, 97%, 98%, 99% identical to SEQ ID NO:184.

[0463] In some embodiments, the second heavy chain comprises a polypeptide sequence which is at least 60%, 62%, 65%, 67%, 70%, 72%, 75%, 77%, 80%, 82%, 85%, 87%, 90%, 92%, 95%, 97%, 98%, 99% identical to SEQ ID NO: 53, a polypeptide sequence which is at least 60%, 62%, 65%, 67%, 70%, 72%, 75%, 77%, 80%, 82%, 85%, 87%, 90%, 92%, 95%, 97%, 98%, 99% identical to SEQ ID NO: 57, a polypeptide sequence which is at least 60%, 62%, 65%, 67%, 70%, 72%, 75%, 77%, 80%, 82%, 85%, 87%, 90%, 92%, 95%, 97%, 98%, 99% identical to SEQ ID NO: 69, a polypeptide sequence which is at least 60%, 62%, 65%, 67%, 70%, 72%, 75%, 77%, 80%, 82%, 85%, 87%, 90%, 92%, 95%, 97%, 98%, 99% identical to SEQ ID NO: 73, a polypeptide sequence which is at least 60%, 62%, 65%, 67%, 70%, 72%, 75%, 77%, 80%, 82%, 85%, 87%, 90%, 92%, 95%, 97%, 98%, 99% identical to SEQ ID NO: 77, a polypeptide sequence which is at least 60%, 62%, 65%, 67%, 70%, 72%, 75%, 77%, 80%, 82%, 85%, 87%, 90%, 92%, 95%, 97%, 98%, 99% identical to SEQ ID NO: 81, a polypeptide sequence which is at least 60%, 62%, 65%, 67%, 70%, 72%, 75%, 77%, 80%, 82%, 85%, 87%, 90%, 92%, 95%, 97%, 98%, 99% identical to SEQ ID NO: 85, a polypeptide sequence which is at least 60%, 62%, 65%, 67%, 70%, 72%, 75%, 77%, 80%, 82%, 85%, 87%, 90%, 92%, 95%, 97%, 98%, 99% identical to SEQ ID NO: 89, a polypeptide sequence which is at least 60%, 62%, 65%, 67%, 70%, 72%, 75%, 77%, 80%, 82%, 85%, 87%, 90%, 92%, 95%, 97%, 98%, 99% identical to SEQ ID NO: 93, a polypeptide sequence which is at least 60%, 62%, 65%, 67%, 70%, 72%, 75%, 77%, 80%, 82%, 85%, 87%, 90%, 92%, 95%, 97%, 98%, 99% identical to SEQ ID NO: 97, a polypeptide sequence which is at least 60%, 62%, 65%, 67%, 70%, 72%, 75%, 77%, 80%, 82%, 85%, 87%, 90%, 92%, 95%, 97%, 98%, 99% identical to SEQ ID NO: 101, a polypeptide sequence which is at least 60%, 62%, 65%, 67%, 70%, 72%, 75%, 77%, 80%, 82%, 85%, 87%, 90%, 92%, 95%, 97%, 98%, 99% identical to SEQ ID NO: 105, a polypeptide sequence which is at least 60%, 62%, 65%, 67%, 70%, 72%, 75%, 77%, 80%, 82%, 85%, 87%, 90%, 92%, 95%, 97%, 98%, 99% identical to SEQ ID NO: 109, a polypeptide sequence which is at least 60%, 62%, 65%, 67%, 70%, 72%, 75%, 77%, 80%, 82%, 85%, 87%, 90%, 92%, 95%, 97%, 98%, 99% identical to SEQ ID NO: 117, a polypeptide sequence which is at least 60%, 62%, 65%, 67%, 70%, 72%, 75%, 77%, 80%, 82%, 85%, 87%, 90%, 92%, 95%, 97%, 98%, 99% identical to SEQ ID NO: 121, a polypeptide sequence which is at least 60%, 62%, 65%, 67%, 70%, 72%, 75%, 77%, 80%, 82%, 85%, 87%, 90%, 92%, 95%, 97%, 98%, 99% identical to SEQ ID NO: 125, a polypeptide sequence which is at least 60%, 62%, 65%, 67%, 70%, 72%, 75%, 77%, 80%, 82%, 85%, 87%, 90%, 92%, 95%, 97%, 98%, 99% identical to SEQ ID NO: 129, a polypeptide sequence which is at least 60%, 62%, 65%, 67%, 70%, 72%, 75%, 77%, 80%, 82%, 85%, 87%, 90%, 92%, 95%, 97%, 98%, 99% identical to SEQ ID NO: 133, a polypeptide sequence which is at least 60%, 62%, 65%, 67%, 70%, 72%, 75%, 77%, 80%, 82%, 85%, 87%, 90%, 92%, 95%, 97%, 98%, 99% identical to SEQ ID NO: 141, a polypeptide sequence which is at least 60%, 62%, 65%, 67%, 70%, 72%, 75%, 77%, 80%, 82%, 85%, 87%, 90%, 92%, 95%, 97%, 98%, 99% identical to SEQ ID NO: 145, a polypeptide sequence which is at least 60%, 62%, 65%, 67%, 70%, 72%, 75%, 77%, 80%, 82%, 85%, 87%, 90%, 92%, 95%, 97%, 98%, 99% identical to SEQ ID NO: 149, a polypeptide sequence which is at least 60%, 62%, 65%, 67%, 70%, 72%, 75%, 77%, 80%, 82%, 85%, 87%, 90%, 92%, 95%, 97%, 98%, 99% identical to SEQ ID NO: 153, a polypeptide sequence which is at least 60%, 62%, 65%, 67%, 70%, 72%, 75%, 77%, 80%, 82%, 85%, 87%, 90%, 92%, 95%, 97%, 98%, 99% identical to SEQ ID NO: 157, a polypeptide sequence which is at least 60%, 62%, 65%, 67%, 70%, 72%, 75%, 77%, 80%, 82%, 85%, 87%, 90%, 92%, 95%, 97%, 98%, 99% identical to SEQ ID NO: 161, a polypeptide sequence which is at least 60%, 62%, 65%, 67%, 70%, 72%, 75%, 77%, 80%, 82%, 85%, 87%, 90%, 92%, 95%, 97%, 98%, 99% identical to SEQ ID NO: 165, a polypeptide sequence which is at least 60%, 62%, 65%, 67%, 70%, 72%, 75%, 77%, 80%, 82%, 85%, 87%, 90%, 92%, 95%, 97%, 98%, 99% identical to SEQ ID NO: 169, a polypeptide sequence which is at least 60%, 62%, 65%, 67%, 70%, 72%, 75%, 77%, 80%, 82%, 85%, 87%, 90%, 92%, 95%, 97%, 98%, 99% identical to SEQ ID NO: 173, a polypeptide sequence which is at least 60%, 62%, 65%, 67%, 70%, 72%, 75%, 77%, 80%, 82%, 85%, 87%, 90%, 92%, 95%, 97%, 98%, 99% identical to SEQ ID NO: 177, a polypeptide sequence which is at least 60%, 62%, 65%, 67%, 70%, 72%, 75%, 77%, 80%, 82%, 85%, 87%, 90%, 92%, 95%, 97%, 98%, 99% identical to SEQ ID NO: 181, or a polypeptide sequence which is at least 60%, 62%, 65%, 67%, 70%, 72%, 75%, 77%, 80%, 82%, 85%, 87%, 90%, 92%, 95%, 97%, 98%, 99% identical to SEQ ID NO: 185.

[0464] In some embodiments, the second light chain comprises a polypeptide sequence which is at least 60%, 62%, 65%, 67%, 70%, 72%, 75%, 77%, 80%, 82%, 85%, 87%, 90%, 92%, 95%, 97%, 98%, 99% identical to SEQ ID NO: 54, a polypeptide sequence which is at least 60%, 62%, 65%, 67%, 70%, 72%, 75%, 77%, 80%, 82%, 85%, 87%, 90%, 92%, 95%, 97%, 98%, 99% identical to SEQ ID NO: 58, a polypeptide sequence which is at least 60%, 62%, 65%, 67%, 70%, 72%, 75%, 77%, 80%, 82%, 85%, 87%, 90%, 92%, 95%, 97%, 98%, 99% identical to SEQ ID NO: 70, a polypeptide sequence which is at least 60%, 62%, 65%, 67%, 70%, 72%, 75%, 77%, 80%, 82%, 85%, 87%, 90%, 92%, 95%, 97%, 98%, 99% identical to SEQ ID NO: 74, a polypeptide sequence which is at least 60%, 62%, 65%, 67%, 70%, 72%, 75%, 77%, 80%, 82%, 85%, 87%, 90%, 92%, 95%, 97%, 98%, 99% identical to SEQ ID NO: 78, a polypeptide sequence which is at least 60%, 62%, 65%, 67%, 70%, 72%, 75%, 77%, 80%, 82%, 85%, 87%, 90%, 92%, 95%, 97%, 98%, 99% identical to SEQ ID NO: 82, a polypeptide sequence which is at least 60%, 62%, 65%, 67%, 70%, 72%, 75%, 77%, 80%, 82%, 85%, 87%, 90%, 92%, 95%, 97%, 98%, 99% identical to SEQ ID NO: 86, a polypeptide sequence which is at least 60%, 62%, 65%, 67%, 70%, 72%, 75%, 77%, 80%, 82%, 85%, 87%, 90%, 92%, 95%, 97%, 98%, 99% identical to SEQ ID NO: 90, a polypeptide sequence which is at least 60%, 62%, 65%, 67%, 70%, 72%, 75%, 77%, 80%, 82%, 85%, 87%, 90%, 92%, 95%, 97%, 98%, 99% identical to SEQ ID NO: 94, a polypeptide sequence which is at least 60%, 62%, 65%, 67%, 70%, 72%, 75%, 77%, 80%, 82%, 85%, 87%, 90%, 92%, 95%, 97%, 98%, 99% identical to SEQ ID NO: 98, a polypeptide sequence which is at least 60%, 62%, 65%, 67%, 70%, 72%, 75%, 77%, 80%, 82%, 85%, 87%, 90%, 92%, 95%, 97%, 98%, 99% identical to SEQ ID NO: 102, a polypeptide sequence which is at least 60%, 62%, 65%, 67%, 70%, 72%, 75%, 77%, 80%, 82%, 85%, 87%, 90%, 92%, 95%, 97%, 98%, 99% identical to SEQ ID NO: 106, a polypeptide sequence which is at least 60%, 62%, 65%, 67%, 70%, 72%, 75%, 77%, 80%, 82%, 85%, 87%, 90%, 92%, 95%, 97%, 98%, 99% identical to SEQ ID NO: 110, a polypeptide sequence which is at least 60%, 62%, 65%, 67%, 70%, 72%, 75%, 77%, 80%, 82%, 85%, 87%, 90%, 92%, 95%, 97%, 98%, 99% identical to SEQ ID NO: 118, a polypeptide sequence which is at least 60%, 62%, 65%, 67%, 70%, 72%, 75%, 77%, 80%, 82%, 85%, 87%, 90%, 92%, 95%, 97%, 98%, 99% identical to SEQ ID NO: 122, a polypeptide sequence which is at least 60%, 62%, 65%, 67%, 70%, 72%, 75%, 77%, 80%, 82%, 85%, 87%, 90%, 92%, 95%, 97%, 98%, 99% identical to SEQ ID NO: 126, a polypeptide sequence which is at least 60%, 62%, 65%, 67%, 70%, 72%, 75%, 77%, 80%, 82%, 85%, 87%, 90%, 92%, 95%, 97%, 98%, 99% identical to SEQ ID NO: 130, a polypeptide sequence which is at least 60%, 62%, 65%, 67%, 70%, 72%, 75%, 77%, 80%, 82%, 85%, 87%, 90%, 92%, 95%, 97%, 98%, 99% identical to SEQ ID NO: 134, a polypeptide sequence which is at least 60%, 62%, 65%, 67%, 70%, 72%, 75%, 77%, 80%, 82%, 85%, 87%, 90%, 92%, 95%, 97%, 98%, 99% identical to SEQ ID NO: 142, a polypeptide sequence which is at least 60%, 62%, 65%, 67%, 70%, 72%, 75%, 77%, 80%, 82%, 85%, 87%, 90%, 92%, 95%, 97%, 98%, 99% identical to SEQ ID NO: 146, a polypeptide sequence which is at least 60%, 62%, 65%, 67%, 70%, 72%, 75%, 77%, 80%, 82%, 85%, 87%, 90%, 92%, 95%, 97%, 98%, 99% identical to SEQ ID NO: 150, a polypeptide sequence which is at least 60%, 62%, 65%, 67%, 70%, 72%, 75%, 77%, 80%, 82%, 85%, 87%, 90%, 92%, 95%, 97%, 98%, 99% identical to SEQ ID NO: 154, a polypeptide sequence which is at least 60%, 62%, 65%, 67%, 70%, 72%, 75%, 77%, 80%, 82%, 85%, 87%, 90%, 92%, 95%, 97%, 98%, 99% identical to SEQ ID NO: 158, a polypeptide sequence which is at least 60%, 62%, 65%, 67%, 70%, 72%, 75%, 77%, 80%, 82%, 85%, 87%, 90%, 92%, 95%, 97%, 98%, 99% identical to SEQ ID NO: 162, a polypeptide sequence which is at least 60%, 62%, 65%, 67%, 70%, 72%, 75%, 77%, 80%, 82%, 85%, 87%, 90%, 92%, 95%, 97%, 98%, 99% identical to SEQ ID NO: 166, a polypeptide sequence which is at least 60%, 62%, 65%, 67%, 70%, 72%, 75%, 77%, 80%, 82%, 85%, 87%, 90%, 92%, 95%, 97%, 98%, 99% identical to SEQ ID NO: 170, a polypeptide sequence which is at least 60%, 62%, 65%, 67%, 70%, 72%, 75%, 77%, 80%, 82%, 85%, 87%, 90%, 92%, 95%, 97%, 98%, 99% identical to SEQ ID NO: 174, a polypeptide sequence which is at least 60%, 62%, 65%, 67%, 70%, 72%, 75%, 77%, 80%, 82%, 85%, 87%, 90%, 92%, 95%, 97%, 98%, 99% identical to SEQ ID NO: 178, a polypeptide sequence which is at least 60%, 62%, 65%, 67%, 70%, 72%, 75%, 77%, 80%, 82%, 85%, 87%, 90%, 92%, 95%, 97%, 98%, 99% identical to SEQ ID NO: 182, or a polypeptide sequence which is at least 60%, 62%, 65%, 67%, 70%, 72%, 75%, 77%, 80%, 82%, 85%, 87%, 90%, 92%, 95%, 97%, 98%, 99% identical to SEQ ID NO: 186.

[0465] In some embodiments, variable domain of the first heavy chain comprises a polypeptide sequence which is at least 60%, 62%, 65%, 67%, 70%, 72%, 75%, 77%, 80%, 82%, 85%, 87%, 90%, 92%, 95%, 97%, 98%, 99% identical to SEQ ID NO: 15, a polypeptide sequence which is at least 60%, 62%, 65%, 67%, 70%, 72%, 75%, 77%, 80%, 82%, 85%, 87%, 90%, 92%, 95%, 97%, 98%, 99% identical to SEQ ID NO: 27, a polypeptide sequence which is at least 60%, 62%, 65%, 67%, 70%, 72%, 75%, 77%, 80%, 82%, 85%, 87%, 90%, 92%, 95%, 97%, 98%, 99% identical to SEQ ID NO: 35, a polypeptide sequence which is at least 60%, 62%, 65%, 67%, 70%, 72%, 75%, 77%, 80%, 82%, 85%, 87%, 90%, 92%, 95%, 97%, 98%, 99% identical to SEQ ID NO: 25, a polypeptide sequence which is at least 60%, 62%, 65%, 67%, 70%, 72%, 75%, 77%, 80%, 82%, 85%, 87%, 90%, 92%, 95%, 97%, 98%, 99% identical to SEQ ID NO: 17, a polypeptide sequence which is at least 60%, 62%, 65%, 67%, 70%, 72%, 75%, 77%, 80%, 82%, 85%, 87%, 90%, 92%, 95%, 97%, 98%, 99% identical to SEQ ID NO: 37, a polypeptide sequence which is at least 60%, 62%, 65%, 67%, 70%, 72%, 75%, 77%, 80%, 82%, 85%, 87%, 90%, 92%, 95%, 97%, 98%, 99% identical to SEQ ID NO: 19, a polypeptide sequence which is at least 60%, 62%, 65%, 67%, 70%, 72%, 75%, 77%, 80%, 82%, 85%, 87%, 90%, 92%, 95%, 97%, 98%, 99% identical to SEQ ID NO: 13, a polypeptide sequence which is at least 60%, 62%, 65%, 67%, 70%, 72%, 75%, 77%, 80%, 82%, 85%, 87%, 90%, 92%, 95%, 97%, 98%, 99% identical to SEQ ID NO: 5, a polypeptide sequence which is at least 60%, 62%, 65%, 67%, 70%, 72%, 75%, 77%, 80%, 82%, 85%, 87%, 90%, 92%, 95%, 97%, 98%, 99% identical to SEQ ID NO: 21, or a polypeptide sequence which is at least 60%, 62%, 65%, 67%, 70%, 72%, 75%, 77%, 80%, 82%, 85%, 87%, 90%, 92%, 95%, 97%, 98%, 99% identical to SEQ ID NO: 41.

[0466] In some embodiments, variable domain of the first light chain comprises a polypeptide sequence which is at least 60%, 62%, 65%, 67%, 70%, 72%, 75%, 77%, 80%, 82%, 85%, 87%, 90%, 92%, 95%, 97%, 98%, 99% identical to SEQ ID NO: 16, a polypeptide sequence which is at least 60%, 62%, 65%, 67%, 70%, 72%, 75%, 77%, 80%, 82%, 85%, 87%, 90%, 92%, 95%, 97%, 98%, 99% identical to SEQ ID NO: 28, a polypeptide sequence which is at least 60%, 62%, 65%, 67%, 70%, 72%, 75%, 77%, 80%, 82%, 85%, 87%, 90%, 92%, 95%, 97%, 98%, 99% identical to SEQ ID NO: 36, a polypeptide sequence which is at least 60%, 62%, 65%, 67%, 70%, 72%, 75%, 77%, 80%, 82%, 85%, 87%, 90%, 92%, 95%, 97%, 98%, 99% identical to SEQ ID NO: 26, a polypeptide sequence which is at least 60%, 62%, 65%, 67%, 70%, 72%, 75%, 77%, 80%, 82%, 85%, 87%, 90%, 92%, 95%, 97%, 98%, 99% identical to SEQ ID NO: 18, a polypeptide sequence which is at least 60%, 62%, 65%, 67%, 70%, 72%, 75%, 77%, 80%, 82%, 85%, 87%, 90%, 92%, 95%, 97%, 98%, 99% identical to SEQ ID NO: 38, a polypeptide sequence which is at least 60%, 62%, 65%, 67%, 70%, 72%, 75%, 77%, 80%, 82%, 85%, 87%, 90%, 92%, 95%, 97%, 98%, 99% identical to SEQ ID NO: 20, a polypeptide sequence which is at least 60%, 62%, 65%, 67%, 70%, 72%, 75%, 77%, 80%, 82%, 85%, 87%, 90%, 92%, 95%, 97%, 98%, 99% identical to SEQ ID NO: 14, a polypeptide sequence which is at least 60%, 62%, 65%, 67%, 70%, 72%, 75%, 77%, 80%, 82%, 85%, 87%, 90%, 92%, 95%, 97%, 98%, 99% identical to SEQ ID NO: 6, a polypeptide sequence which is at least 60%, 62%, 65%, 67%, 70%, 72%, 75%, 77%, 80%, 82%, 85%, 87%, 90%, 92%, 95%, 97%, 98%, 99% identical to SEQ ID NO: 22, or a polypeptide sequence which is at least 60%, 62%, 65%, 67%, 70%, 72%, 75%, 77%, 80%, 82%, 85%, 87%, 90%, 92%, 95%, 97%, 98%, 99% identical to SEQ ID NO: 42.

[0467] In some embodiments, variable domain of the second heavy chain comprises a polypeptide sequence which is at least 60%, 62%, 65%, 67%, 70%, 72%, 75%, 77%, 80%, 82%, 85%, 87%, 90%, 92%, 95%, 97%, 98%, 99% identical to SEQ ID NO: 27, a polypeptide sequence which is at least 60%, 62%, 65%, 67%, 70%, 72%, 75%, 77%, 80%, 82%, 85%, 87%, 90%, 92%, 95%, 97%, 98%, 99% identical to SEQ ID NO: 15, a polypeptide sequence which is at least 60%, 62%, 65%, 67%, 70%, 72%, 75%, 77%, 80%, 82%, 85%, 87%, 90%, 92%, 95%, 97%, 98%, 99% identical to SEQ ID NO: 5, a polypeptide sequence which is at least 60%, 62%, 65%, 67%, 70%, 72%, 75%, 77%, 80%, 82%, 85%, 87%, 90%, 92%, 95%, 97%, 98%, 99% identical to SEQ ID NO: 19, a polypeptide sequence which is at least 60%, 62%, 65%, 67%, 70%, 72%, 75%, 77%, 80%, 82%, 85%, 87%, 90%, 92%, 95%, 97%, 98%, 99% identical to SEQ ID NO: 21, a polypeptide sequence which is at least 60%, 62%, 65%, 67%, 70%, 72%, 75%, 77%, 80%, 82%, 85%, 87%, 90%, 92%, 95%, 97%, 98%, 99% identical to SEQ ID NO: 15, a polypeptide sequence which is at least 60%, 62%, 65%, 67%, 70%, 72%, 75%, 77%, 80%, 82%, 85%, 87%, 90%, 92%, 95%, 97%, 98%, 99% identical to SEQ ID NO: 29, a polypeptide sequence which is at least 60%, 62%, 65%, 67%, 70%, 72%, 75%, 77%, 80%, 82%, 85%, 87%, 90%, 92%, 95%, 97%, 98%, 99% identical to SEQ ID NO: 35, a polypeptide sequence which is at least 60%, 62%, 65%, 67%, 70%, 72%, 75%, 77%, 80%, 82%, 85%, 87%, 90%, 92%, 95%, 97%, 98%, 99% identical to SEQ ID NO: 23, a polypeptide sequence which is at least 60%, 62%, 65%, 67%, 70%, 72%, 75%, 77%, 80%, 82%, 85%, 87%, 90%, 92%, 95%, 97%, 98%, 99% identical to SEQ ID NO: 25, a polypeptide sequence which is at least 60%, 62%, 65%, 67%, 70%, 72%, 75%, 77%, 80%, 82%, 85%, 87%, 90%, 92%, 95%, 97%, 98%, 99% identical to SEQ ID NO: 37, a polypeptide sequence which is at least 60%, 62%, 65%, 67%, 70%, 72%, 75%, 77%, 80%, 82%, 85%, 87%, 90%, 92%, 95%, 97%, 98%, 99% identical to SEQ ID NO: 39, a polypeptide sequence which is at least 60%, 62%, 65%, 67%, 70%, 72%, 75%, 77%, 80%, 82%, 85%, 87%, 90%, 92%, 95%, 97%, 98%, 99% identical to SEQ ID NO: 43, or a polypeptide sequence which is at least 60%, 62%, 65%, 67%, 70%, 72%, 75%, 77%, 80%, 82%, 85%, 87%, 90%, 92%, 95%, 97%, 98%, 99% identical to SEQ ID NO: 9.

[0468] In some embodiments, variable domain of the second light chain comprises a polypeptide sequence which is at least 60%, 62%, 65%, 67%, 70%, 72%, 75%, 77%, 80%, 82%, 85%, 87%, 90%, 92%, 95%, 97%, 98%, 99% identical to SEQ ID NO: 28, a polypeptide sequence which is at least 60%, 62%, 65%, 67%, 70%, 72%, 75%, 77%, 80%, 82%, 85%, 87%, 90%, 92%, 95%, 97%, 98%, 99% identical to SEQ ID NO: 16, a polypeptide sequence which is at least 60%, 62%, 65%, 67%, 70%, 72%, 75%, 77%, 80%, 82%, 85%, 87%, 90%, 92%, 95%, 97%, 98%, 99% identical to SEQ ID NO: 6, a polypeptide sequence which is at least 60%, 62%, 65%, 67%, 70%, 72%, 75%, 77%, 80%, 82%, 85%, 87%, 90%, 92%, 95%, 97%, 98%, 99% identical to SEQ ID NO: 20, a polypeptide sequence which is at least 60%, 62%, 65%, 67%, 70%, 72%, 75%, 77%, 80%, 82%, 85%, 87%, 90%, 92%, 95%, 97%, 98%, 99% identical to SEQ ID NO: 22, a polypeptide sequence which is at least 60%, 62%, 65%, 67%, 70%, 72%, 75%, 77%, 80%, 82%, 85%, 87%, 90%, 92%, 95%, 97%, 98%, 99% identical to SEQ ID NO: 16, a polypeptide sequence which is at least 60%, 62%, 65%, 67%, 70%, 72%, 75%, 77%, 80%, 82%, 85%, 87%, 90%, 92%, 95%, 97%, 98%, 99% identical to SEQ ID NO: 30, a polypeptide sequence which is at least 60%, 62%, 65%, 67%, 70%, 72%, 75%, 77%, 80%, 82%, 85%, 87%, 90%, 92%, 95%, 97%, 98%, 99% identical to SEQ ID NO: 36, a polypeptide sequence which is at least 60%, 62%, 65%, 67%, 70%, 72%, 75%, 77%, 80%, 82%, 85%, 87%, 90%, 92%, 95%, 97%, 98%, 99% identical to SEQ ID NO: 24, a polypeptide sequence which is at least 60%, 62%, 65%, 67%, 70%, 72%, 75%, 77%, 80%, 82%, 85%, 87%, 90%, 92%, 95%, 97%, 98%, 99% identical to SEQ ID NO: 26, a polypeptide sequence which is at least 60%, 62%, 65%, 67%, 70%, 72%, 75%, 77%, 80%, 82%, 85%, 87%, 90%, 92%, 95%, 97%, 98%, 99% identical to SEQ ID NO: 38, a polypeptide sequence which is at least 60%, 62%, 65%, 67%, 70%, 72%, 75%, 77%, 80%, 82%, 85%, 87%, 90%, 92%, 95%, 97%, 98%, 99% identical to SEQ ID NO: 40, a polypeptide sequence which is at least 60%, 62%, 65%, 67%, 70%, 72%, 75%, 77%, 80%, 82%, 85%, 87%, 90%, 92%, 95%, 97%, 98%, 99% identical to SEQ ID NO: 44, or a polypeptide sequence which is at least 60%, 62%, 65%, 67%, 70%, 72%, 75%, 77%, 80%, 82%, 85%, 87%, 90%, 92%, 95%, 97%, 98%, 99% identical to SEQ ID NO: 10.

[0469] In some embodiments, the variable domain of the first heavy chain comprises the CDR1, CDR2, and CDR3 of SEQ ID NO: 51; the CDR1, CDR2, and CDR3 of SEQ ID NO: 55; the CDR1, CDR2, and CDR3 of SEQ ID NO: 67; the CDR1, CDR2, and CDR3 of SEQ ID NO: 71; the CDR1, CDR2, and CDR3 of SEQ ID NO: 75; the CDR1, CDR2, and CDR3 of SEQ ID NO: 79; the CDR1, CDR2, and CDR3 of SEQ ID NO: 83; the CDR1, CDR2, and CDR3 of SEQ ID NO: 87; the CDR1, CDR2, and CDR3 of SEQ ID NO: 91; the CDR1, CDR2, and CDR3 of SEQ ID NO: 95; the CDR1, CDR2, and CDR3 of SEQ ID NO: 99; the CDR1, CDR2, and CDR3 of SEQ ID NO: 103; the CDR1, CDR2, and CDR3 of SEQ ID NO: 107; the CDR1, CDR2, and CDR3 of SEQ ID NO: 115; the CDR1, CDR2, and CDR3 of SEQ ID NO: 119, the CDR1, CDR2, and CDR3 of SEQ ID NO: 123, the CDR1, CDR2, and CDR3 of SEQ ID NO: 127; the CDR1, CDR2, and CDR3 of SEQ ID NO: 131; the CDR1, CDR2, and CDR3 of SEQ ID NO: 139; the CDR1, CDR2, and CDR3 of SEQ ID NO: 143; the CDR1, CDR2, and CDR3 of SEQ ID NO: 147; the CDR1, CDR2, and CDR3 of SEQ ID NO: 151; the CDR1, CDR2, and CDR3 of SEQ ID NO: 155; the CDR1, CDR2, and CDR3 of SEQ ID NO: 159; the CDR1, CDR2, and CDR3 of SEQ ID NO: 163; the CDR1, CDR2, and CDR3 of SEQ ID NO: 167, the CDR1, CDR2, and CDR3 of SEQ ID NO: 171, the CDR1, CDR2, and CDR3 of SEQ ID NO: 175, the CDR1, CDR2, and CDR3 of SEQ ID NO: 179, or the CDR1, CDR2, and CDR3 of SEQ ID NO: 183.

[0470] In some embodiments, the variable domain of the first light chain comprises the CDR1, CDR2, and CDR3 of SEQ ID NO: 52; the CDR1, CDR2, and CDR3 of SEQ ID NO: 56; the CDR1, CDR2, and CDR3 of SEQ ID NO: 68; the CDR1, CDR2, and CDR3 of SEQ ID NO: 72; the CDR1, CDR2, and CDR3 of SEQ ID NO: 76; the CDR1, CDR2, and CDR3 of SEQ ID NO: 80; the CDR1, CDR2, and CDR3 of SEQ ID NO: 84; the CDR1, CDR2, and CDR3 of SEQ ID NO: 88; the CDR1, CDR2, and CDR3 of SEQ ID NO: 92; the CDR1, CDR2, and CDR3 of SEQ ID NO: 96; the CDR1, CDR2, and CDR3 of SEQ ID NO: 100; the CDR1, CDR2, and CDR3 of SEQ ID NO: 104; the CDR1, CDR2, and CDR3 of SEQ ID NO: 108; the CDR1, CDR2, and CDR3 of SEQ ID NO: 116; the CDR1, CDR2, and CDR3 of SEQ ID NO: 120; the CDR1, CDR2, and CDR3 of SEQ ID NO: 124; the CDR1, CDR2, and CDR3 of SEQ ID NO: 128; the CDR1, CDR2, and CDR3 of SEQ ID NO: 132; the CDR1, CDR2, and CDR3 of SEQ ID NO: 140; the CDR1, CDR2, and CDR3 of SEQ ID NO: 144; the CDR1, CDR2, and CDR3 of SEQ ID NO: 148; the CDR1, CDR2, and CDR3 of SEQ ID NO: 152; the CDR1, CDR2, and CDR3 of SEQ ID NO: 156; the CDR1, CDR2, and CDR3 of SEQ ID NO: 160; the CDR1, CDR2, and CDR3 of SEQ ID NO: 164; the CDR1, CDR2, and CDR3 of SEQ ID NO: 168, the CDR1, CDR2, and CDR3 of SEQ ID NO: 172, the CDR1, CDR2, and CDR3 of SEQ ID NO: 176, the CDR1, CDR2, and CDR3 of SEQ ID NO: 180, or the CDR1, CDR2, and CDR3 of SEQ ID NO: 184.

[0471] In some embodiments, the variable domain of the second heavy chain comprises the CDR1, CDR2, and CDR3 of SEQ ID NO: 53; the CDR1, CDR2, and CDR3 of SEQ ID NO: 57; the CDR1, CDR2, and CDR3 of SEQ ID NO: 69; the CDR1, CDR2, and CDR3 of SEQ ID NO: 73; the CDR1, CDR2, and CDR3 of SEQ ID NO: 77; the CDR1, CDR2, and CDR3 of SEQ ID NO: 81; the CDR1, CDR2, and CDR3 of SEQ ID NO: 85; the CDR1, CDR2, and CDR3 of SEQ ID NO: 89; the CDR1, CDR2, and CDR3 of SEQ ID NO: 93; the CDR1, CDR2, and CDR3 of SEQ ID NO: 97; the CDR1, CDR2, and CDR3 of SEQ ID NO: 101; the CDR1, CDR2, and CDR3 of SEQ ID NO: 105; the CDR1, CDR2, and CDR3 of SEQ ID NO: 109; the CDR1, CDR2, and CDR3 of SEQ ID NO: 117; the CDR1, CDR2, and CDR3 of SEQ ID NO: 121; the CDR1, CDR2, and CDR3 of SEQ ID NO: 125; the CDR1, CDR2, and CDR3 of SEQ ID NO: 129; the CDR1, CDR2, and CDR3 of SEQ ID NO: 133; the CDR1, CDR2, and CDR3 of SEQ ID NO: 141; the CDR1, CDR2, and CDR3 of SEQ ID NO: 145; the CDR1, CDR2, and CDR3 of SEQ ID NO: 149; the CDR1, CDR2, and CDR3 of SEQ ID NO: 153; the CDR1, CDR2, and CDR3 of SEQ ID NO: 157; the CDR1, CDR2, and CDR3 of SEQ ID NO: 161; the CDR1, CDR2, and CDR3 of SEQ ID NO: 165; the CDR1, CDR2, and CDR3 of SEQ ID NO: 169, the CDR1, CDR2, and CDR3 of SEQ ID NO: 173, the CDR1, CDR2, and CDR3 of SEQ ID NO: 177, the CDR1, CDR2, and CDR3 of SEQ ID NO: 181, or the CDR1, CDR2, and CDR3 of SEQ ID NO: 185.

[0472] In some embodiments, the variable domain of the second light chain comprises the CDR1, CDR2, and CDR3 of SEQ ID NO: 54; the CDR1, CDR2, and CDR3 of SEQ ID NO: 58; the CDR1, CDR2, and CDR3 of SEQ ID NO: 70; the CDR1, CDR2, and CDR3 of SEQ ID NO: 74; the CDR1, CDR2, and CDR3 of SEQ ID NO: 78; the CDR1, CDR2, and CDR3 of SEQ ID NO: 82; the CDR1, CDR2, and CDR3 of SEQ ID NO: 86; the CDR1, CDR2, and CDR3 of SEQ ID NO: 90; the CDR1, CDR2, and CDR3 of SEQ ID NO: 94; the CDR1, CDR2, and CDR3 of SEQ ID NO: 98; the CDR1, CDR2, and CDR3 of SEQ ID NO: 102; the CDR1, CDR2, and CDR3 of SEQ ID NO: 106; the CDR1, CDR2, and CDR3 of SEQ ID NO: 110; the CDR1, CDR2, and CDR3 of SEQ ID NO: 118; the CDR1, CDR2, and CDR3 of SEQ ID NO: 122; the CDR1, CDR2, and CDR3 of SEQ ID NO: 126; the CDR1, CDR2, and CDR3 of SEQ ID NO: 130; the CDR1, CDR2, and CDR3 of SEQ ID NO: 134; the CDR1, CDR2, and CDR3 of SEQ ID NO: 142; the CDR1, CDR2, and CDR3 of SEQ ID NO: 146; the CDR1, CDR2, and CDR3 of SEQ ID NO: 150; the CDR1, CDR2, and CDR3 of SEQ ID NO: 154; the CDR1, CDR2, and CDR3 of SEQ ID NO: 158; the CDR1, CDR2, and CDR3 of SEQ ID NO: 162, the CDR1, CDR2, and CDR3 of SEQ ID NO: 166; the CDR1, CDR2, and CDR3 of SEQ ID NO: 170, the CDR1, CDR2, and CDR3 of SEQ ID NO: 174, the CDR1, CDR2, and CDR3 of SEQ ID NO: 178, the CDR1, CDR2, and CDR3 of SEQ ID NO: 182, or the CDR1, CDR2, and CDR3 of SEQ ID NO: 186.

[0473] In some embodiments, the molecule comprises SEQ ID NO: 51, SEQ ID NO: 52, SEQ ID NO: 53, and SEQ ID NO: 54. In some embodiments, the molecule comprises SEQ ID NO: 55, SEQ ID NO: 56, SEQ ID NO: 57, and SEQ ID NO: 58. In some embodiments, the molecule comprises SEQ ID NO: 67, SEQ ID NO: 68, SEQ ID NO: 69, and SEQ ID NO: 70. In some embodiments, the molecule comprises SEQ ID NO: 71, SEQ ID NO: 72, SEQ ID NO: 73, and SEQ ID NO: 74. In some embodiments, the molecule comprises SEQ ID NO: 75, SEQ ID NO: 76, SEQ ID NO: 77, and SEQ ID NO: 78. In some embodiments, the molecule comprises SEQ ID NO: 79, SEQ ID NO: 80, SEQ ID NO: 81, and SEQ ID NO: 82. In some embodiments, the molecule comprises SEQ ID NO: 83, SEQ ID NO: 84, SEQ ID NO: 85, and SEQ ID NO: 86. In some embodiments, the molecule comprises SEQ ID NO: 87, SEQ ID NO: 88, SEQ ID NO: 89, and SEQ ID NO: 90. In some embodiments, the molecule comprises SEQ ID NO: 91, SEQ ID NO: 92, SEQ ID NO: 93, and SEQ ID NO: 94. In some embodiments, the molecule comprises SEQ ID NO: 95, SEQ ID NO: 96, SEQ ID NO: 97, and SEQ ID NO: 98. In some embodiments, the molecule comprises SEQ ID NO: 99, SEQ ID NO: 100, SEQ ID NO: 101, and SEQ ID NO: 102. In some embodiments, the molecule comprises SEQ ID NO: 103, SEQ ID NO: 104, SEQ ID NO: 105, and SEQ ID NO: 106. In some embodiments, the molecule comprises SEQ ID NO: 107, SEQ ID NO: 108, SEQ ID NO: 109, and SEQ ID NO: 110. In some embodiments, the molecule comprises SEQ ID NO: 115, SEQ ID NO: 116, SEQ ID NO: 117, and SEQ ID NO: 118. In some embodiments, the molecule comprises SEQ ID NO: 119, SEQ ID NO: 120, SEQ ID NO: 121, and SEQ ID NO: 122.

[0474] In some embodiments, the molecule comprises SEQ ID NO: 123, SEQ ID NO: 124, SEQ ID NO: 125, and SEQ ID NO: 126. In some embodiments, the molecule comprises SEQ ID NO: 127, SEQ ID NO: 128, SEQ ID NO: 129, and SEQ ID NO: 130. In some embodiments, the molecule comprises SEQ ID NO: 131, SEQ ID NO: 132, SEQ ID NO: 133, and SEQ ID NO: 133. In some embodiments, the molecule comprises SEQ ID NO: 139, SEQ ID NO: 140, SEQ ID NO: 141, and SEQ ID NO: 142. In some embodiments, the molecule comprises SEQ ID NO: 143, SEQ ID NO: 144, SEQ ID NO: 145, and SEQ ID NO: 146. In some embodiments, the molecule comprises SEQ ID NO: 147, SEQ ID NO: 148, SEQ ID NO: 149, and SEQ ID NO: 150. In some embodiments, the molecule comprises SEQ ID NO: 151, SEQ ID NO: 152, SEQ ID NO: 153, and SEQ ID NO: 154. In some embodiments, the molecule comprises SEQ ID NO: 155, SEQ ID NO: 156, SEQ ID NO: 157, and SEQ ID NO: 158. In some embodiments, the molecule comprises SEQ ID NO: 159, SEQ ID NO: 160, SEQ ID NO: 161, and SEQ ID NO: 162. In some embodiments, the molecule comprises SEQ ID NO: 163, SEQ ID NO: 164, SEQ ID NO: 165, and SEQ ID NO: 166. In some embodiments, the molecule comprises SEQ ID NO: 167, SEQ ID NO: 168, SEQ ID NO: 169, and SEQ ID NO: 170. In some embodiments, the molecule comprises SEQ ID NO: 171, SEQ ID NO: 172, SEQ ID NO: 173, and SEQ ID NO: 174. In some embodiments, the molecule comprises SEQ ID NO: 175, SEQ ID NO: 176, SEQ ID NO: 177, and SEQ ID NO: 178. In some embodiments, the molecule comprises SEQ ID NO: 179, SEQ ID NO: 180, SEQ ID NO: 181, and SEQ ID NO: 182. In some embodiments, the molecule comprises SEQ ID NO: 183, SEQ ID NO: 184, SEQ ID NO: 185, and SEQ ID NO: 186.

[0475] In some embodiments, the molecule further comprises one or more disulfide bonds. In some embodiments, the molecule further comprises one or more linker sequences. In some embodiments, the molecule is capable of neutralizing a coronavirus. In some embodiments, the coronavirus is a SARS-CoV-2 virus. In some embodiments, the SARS-CoV-2 virus strain is selected from the group consisting of WA1, B.1.1.7, B1.526, B1.351, P1, B1.352, and B.1.427.

[0476] In some embodiments, the molecule specifically recognizes a first epitope and a second epitope on a SARS-CoV-2 particle. In some embodiments, the first epitope comprises at least a portion of a receptor binding domain (RBD) on a spike protein of a SARS-CoV-2 particle. In some embodiments, the second epitope comprises at least a portion of a N-terminal domain (NTD) on a spike protein of a SARS-CoV-2 particle.

[0477] In certain aspects, the invention provides a method of treating or preventing a COVID-19 infection in a subject in need thereof, the method comprising administering to the subject a composition comprising a bispecific molecule comprising a first polypeptide chain and a second polypeptide chain, wherein: the first polypeptide chain comprises: a first light chain comprising a variable domain and a constant domain; a first heavy chain comprising a variable domain and a constant domain; the second polypeptide chain comprises: a second light chain comprising a variable domain and a constant domain; and a second heavy chain comprising a variable domain and a constant domain.

[0478] In some embodiments, the first polypeptide chain and the second polypeptide chain are covalently bonded to one another. In some embodiments, the first heavy chain comprises a polypeptide sequence which is at least 60%, 62%, 65%, 67%, 70%, 72%, 75%, 77%, 80%, 82%, 85%, 87%, 90%, 92%, 95%, 97%, 98%, 99% identical to SEQ ID NO: 51, a polypeptide sequence which is at least 60%, 62%, 65%, 67%, 70%, 72%, 75%, 77%, 80%, 82%, 85%, 87%, 90%, 92%, 95%, 97%, 98%, 99% identical to SEQ ID NO: 55, a polypeptide sequence which is at least 60%, 62%, 65%, 67%, 70%, 72%, 75%, 77%, 80%, 82%, 85%, 87%, 90%, 92%, 95%, 97%, 98%, 99% identical to SEQ ID NO: 67, a polypeptide sequence which is at least 60%, 62%, 65%, 67%, 70%, 72%, 75%, 77%, 80%, 82%, 85%, 87%, 90%, 92%, 95%, 97%, 98%, 99% identical to SEQ ID NO: 71, a polypeptide sequence which is at least 60%, 62%, 65%, 67%, 70%, 72%, 75%, 77%, 80%, 82%, 85%, 87%, 90%, 92%, 95%, 97%, 98%, 99% identical to SEQ ID NO: 75, a polypeptide sequence which is at least 60%, 62%, 65%, 67%, 70%, 72%, 75%, 77%, 80%, 82%, 85%, 87%, 90%, 92%, 95%, 97%, 98%, 99% identical to SEQ ID NO: 79, a polypeptide sequence which is at least 60%, 62%, 65%, 67%, 70%, 72%, 75%, 77%, 80%, 82%, 85%, 87%, 90%, 92%, 95%, 97%, 98%, 99% identical to SEQ ID NO: 83, a polypeptide sequence which is at least 60%, 62%, 65%, 67%, 70%, 72%, 75%, 77%, 80%, 82%, 85%, 87%, 90%, 92%, 95%, 97%, 98%, 99% identical to SEQ ID NO: 87, a polypeptide sequence which is at least 60%, 62%, 65%, 67%, 70%, 72%, 75%, 77%, 80%, 82%, 85%, 87%, 90%, 92%, 95%, 97%, 98%, 99% identical to SEQ ID NO: 91, a polypeptide sequence which is at least 60%, 62%, 65%, 67%, 70%, 72%, 75%, 77%, 80%, 82%, 85%, 87%, 90%, 92%, 95%, 97%, 98%, 99% identical to SEQ ID NO: 95, a polypeptide sequence which is at least 60%, 62%, 65%, 67%, 70%, 72%, 75%, 77%, 80%, 82%, 85%, 87%, 90%, 92%, 95%, 97%, 98%, 99% identical to SEQ ID NO: 99, a polypeptide sequence which is at least 60%, 62%, 65%, 67%, 70%, 72%, 75%, 77%, 80%, 82%, 85%, 87%, 90%, 92%, 95%, 97%, 98%, 99% identical to SEQ ID NO: 103, a polypeptide sequence which is at least 60%, 62%, 65%, 67%, 70%, 72%, 75%, 77%, 80%, 82%, 85%, 87%, 90%, 92%, 95%, 97%, 98%, 99% identical to SEQ ID NO: 107, a polypeptide sequence which is at least 60%, 62%, 65%, 67%, 70%, 72%, 75%, 77%, 80%, 82%, 85%, 87%, 90%, 92%, 95%, 97%, 98%, 99% identical to SEQ ID NO: 115, a polypeptide sequence which is at least 60%, 62%, 65%, 67%, 70%, 72%, 75%, 77%, 80%, 82%, 85%, 87%, 90%, 92%, 95%, 97%, 98%, 99% identical to SEQ ID NO: 119, a polypeptide sequence which is at least 60%, 62%, 65%, 67%, 70%, 72%, 75%, 77%, 80%, 82%, 85%, 87%, 90%, 92%, 95%, 97%, 98%, 99% identical to SEQ ID NO: 123, a polypeptide sequence which is at least 60%, 62%, 65%, 67%, 70%, 72%, 75%, 77%, 80%, 82%, 85%, 87%, 90%, 92%, 95%, 97%, 98%, 99% identical to SEQ ID NO: 127, a polypeptide sequence which is at least 60%, 62%, 65%, 67%, 70%, 72%, 75%, 77%, 80%, 82%, 85%, 87%, 90%, 92%, 95%, 97%, 98%, 99% identical to SEQ ID NO: 131, a polypeptide sequence which is at least 60%, 62%, 65%, 67%, 70%, 72%, 75%, 77%, 80%, 82%, 85%, 87%, 90%, 92%, 95%, 97%, 98%, 99% identical to SEQ ID NO: 139, a polypeptide sequence which is at least 60%, 62%, 65%, 67%, 70%, 72%, 75%, 77%, 80%, 82%, 85%, 87%, 90%, 92%, 95%, 97%, 98%, 99% identical to SEQ ID NO: 143, a polypeptide sequence which is at least 60%, 62%, 65%, 67%, 70%, 72%, 75%, 77%, 80%, 82%, 85%, 87%, 90%, 92%, 95%, 97%, 98%, 99% identical to SEQ ID NO: 147, a polypeptide sequence which is at least 60%, 62%, 65%, 67%, 70%, 72%, 75%, 77%, 80%, 82%, 85%, 87%, 90%, 92%, 95%, 97%, 98%, 99% identical to SEQ ID NO: 151, a polypeptide sequence which is at least 60%, 62%, 65%, 67%, 70%, 72%, 75%, 77%, 80%, 82%, 85%, 87%, 90%, 92%, 95%, 97%, 98%, 99% identical to SEQ ID NO: 155, a polypeptide sequence which is at least 60%, 62%, 65%, 67%, 70%, 72%, 75%, 77%, 80%, 82%, 85%, 87%, 90%, 92%, 95%, 97%, 98%, 99% identical to SEQ ID NO: 159, a polypeptide sequence which is at least 60%, 62%, 65%, 67%, 70%, 72%, 75%, 77%, 80%, 82%, 85%, 87%, 90%, 92%, 95%, 97%, 98%, 99% identical to SEQ ID NO: 163, a polypeptide sequence which is at least 60%, 62%, 65%, 67%, 70%, 72%, 75%, 77%, 80%, 82%, 85%, 87%, 90%, 92%, 95%, 97%, 98%, 99% identical to SEQ ID NO: 167, a polypeptide sequence which is at least 60%, 62%, 65%, 67%, 70%, 72%, 75%, 77%, 80%, 82%, 85%, 87%, 90%, 92%, 95%, 97%, 98%, 99% identical to SEQ ID NO: 171, a polypeptide sequence which is at least 60%, 62%, 65%, 67%, 70%, 72%, 75%, 77%, 80%, 82%, 85%, 87%, 90%, 92%, 95%, 97%, 98%, 99% identical to SEQ ID NO: 175, a polypeptide sequence which is at least 60%, 62%, 65%, 67%, 70%, 72%, 75%, 77%, 80%, 82%, 85%, 87%, 90%, 92%, 95%, 97%, 98%, 99% identical to SEQ ID NO: 179, or a polypeptide sequence which is at least 60%, 62%, 65%, 67%, 70%, 72%, 75%, 77%, 80%, 82%, 85%, 87%, 90%, 92%, 95%, 97%, 98%, 99% identical to SEQ ID NO:183.

[0479] In some embodiments, the first light chain comprises a polypeptide sequence which is at least 60%, 62%, 65%, 67%, 70%, 72%, 75%, 77%, 80%, 82%, 85%, 87%, 90%, 92%, 95%, 97%, 98%, 99% identical to SEQ ID NO: 52, a polypeptide sequence which is at least 60%, 62%, 65%, 67%, 70%, 72%, 75%, 77%, 80%, 82%, 85%, 87%, 90%, 92%, 95%, 97%, 98%, 99% identical to SEQ ID NO: 56, a polypeptide sequence which is at least 60%, 62%, 65%, 67%, 70%, 72%, 75%, 77%, 80%, 82%, 85%, 87%, 90%, 92%, 95%, 97%, 98%, 99% identical to SEQ ID NO: 68; a polypeptide sequence which is at least 60%, 62%, 65%, 67%, 70%, 72%, 75%, 77%, 80%, 82%, 85%, 87%, 90%, 92%, 95%, 97%, 98%, 99% identical to SEQ ID NO: 72, a polypeptide sequence which is at least 60%, 62%, 65%, 67%, 70%, 72%, 75%, 77%, 80%, 82%, 85%, 87%, 90%, 92%, 95%, 97%, 98%, 99% identical to SEQ ID NO: 76, a polypeptide sequence which is at least 60%, 62%, 65%, 67%, 70%, 72%, 75%, 77%, 80%, 82%, 85%, 87%, 90%, 92%, 95%, 97%, 98%, 99% identical to SEQ ID NO: 80, a polypeptide sequence which is at least 60%, 62%, 65%, 67%, 70%, 72%, 75%, 77%, 80%, 82%, 85%, 87%, 90%, 92%, 95%, 97%, 98%, 99% identical to SEQ ID NO: 84, a polypeptide sequence which is at least 60%, 62%, 65%, 67%, 70%, 72%, 75%, 77%, 80%, 82%, 85%, 87%, 90%, 92%, 95%, 97%, 98%, 99% identical to SEQ ID NO: 88, a polypeptide sequence which is at least 60%, 62%, 65%, 67%, 70%, 72%, 75%, 77%, 80%, 82%, 85%, 87%, 90%, 92%, 95%, 97%, 98%, 99% identical to SEQ ID NO: 92, a polypeptide sequence which is at least 60%, 62%, 65%, 67%, 70%, 72%, 75%, 77%, 80%, 82%, 85%, 87%, 90%, 92%, 95%, 97%, 98%, 99% identical to SEQ ID NO: 96, a polypeptide sequence which is at least 60%, 62%, 65%, 67%, 70%, 72%, 75%, 77%, 80%, 82%, 85%, 87%, 90%, 92%, 95%, 97%, 98%, 99% identical to SEQ ID NO: 100, a polypeptide sequence which is at least 60%, 62%, 65%, 67%, 70%, 72%, 75%, 77%, 80%, 82%, 85%, 87%, 90%, 92%, 95%, 97%, 98%, 99% identical to SEQ ID NO: 104, a polypeptide sequence which is at least 60%, 62%, 65%, 67%, 70%, 72%, 75%, 77%, 80%, 82%, 85%, 87%, 90%, 92%, 95%, 97%, 98%, 99% identical to SEQ ID NO: 108, a polypeptide sequence which is at least 60%, 62%, 65%, 67%, 70%, 72%, 75%, 77%, 80%, 82%, 85%, 87%, 90%, 92%, 95%, 97%, 98%, 99% identical to SEQ ID NO: 116, a polypeptide sequence which is at least 60%, 62%, 65%, 67%, 70%, 72%, 75%, 77%, 80%, 82%, 85%, 87%, 90%, 92%, 95%, 97%, 98%, 99% identical to SEQ ID NO: 120, a polypeptide sequence which is at least 60%, 62%, 65%, 67%, 70%, 72%, 75%, 77%, 80%, 82%, 85%, 87%, 90%, 92%, 95%, 97%, 98%, 99% identical to SEQ ID NO: 124, a polypeptide sequence which is at least 60%, 62%, 65%, 67%, 70%, 72%, 75%, 77%, 80%, 82%, 85%, 87%, 90%, 92%, 95%, 97%, 98%, 99% identical to SEQ ID NO: 128, a polypeptide sequence which is at least 60%, 62%, 65%, 67%, 70%, 72%, 75%, 77%, 80%, 82%, 85%, 87%, 90%, 92%, 95%, 97%, 98%, 99% identical to SEQ ID NO: 132, a polypeptide sequence which is at least 60%, 62%, 65%, 67%, 70%, 72%, 75%, 77%, 80%, 82%, 85%, 87%, 90%, 92%, 95%, 97%, 98%, 99% identical to SEQ ID NO: 140, a polypeptide sequence which is at least 60%, 62%, 65%, 67%, 70%, 72%, 75%, 77%, 80%, 82%, 85%, 87%, 90%, 92%, 95%, 97%, 98%, 99% identical to SEQ ID NO: 144, a polypeptide sequence which is at least 60%, 62%, 65%, 67%, 70%, 72%, 75%, 77%, 80%, 82%, 85%, 87%, 90%, 92%, 95%, 97%, 98%, 99% identical to SEQ ID NO: 148, a polypeptide sequence which is at least 60%, 62%, 65%, 67%, 70%, 72%, 75%, 77%, 80%, 82%, 85%, 87%, 90%, 92%, 95%, 97%, 98%, 99% identical to SEQ ID NO: 152, a polypeptide sequence which is at least 60%, 62%, 65%, 67%, 70%, 72%, 75%, 77%, 80%, 82%, 85%, 87%, 90%, 92%, 95%, 97%, 98%, 99% identical to SEQ ID NO: 156, a polypeptide sequence which is at least 60%, 62%, 65%, 67%, 70%, 72%, 75%, 77%, 80%, 82%, 85%, 87%, 90%, 92%, 95%, 97%, 98%, 99% identical to SEQ ID NO: 160, a polypeptide sequence which is at least 60%, 62%, 65%, 67%, 70%, 72%, 75%, 77%, 80%, 82%, 85%, 87%, 90%, 92%, 95%, 97%, 98%, 99% identical to SEQ ID NO: 164, a polypeptide sequence which is at least 60%, 62%, 65%, 67%, 70%, 72%, 75%, 77%, 80%, 82%, 85%, 87%, 90%, 92%, 95%, 97%, 98%, 99% identical to SEQ ID NO: 168, a polypeptide sequence which is at least 60%, 62%, 65%, 67%, 70%, 72%, 75%, 77%, 80%, 82%, 85%, 87%, 90%, 92%, 95%, 97%, 98%, 99% identical to SEQ ID NO: 172, a polypeptide sequence which is at least 60%, 62%, 65%, 67%, 70%, 72%, 75%, 77%, 80%, 82%, 85%, 87%, 90%, 92%, 95%, 97%, 98%, 99% identical to SEQ ID NO: 176, a polypeptide sequence which is at least 60%, 62%, 65%, 67%, 70%, 72%, 75%, 77%, 80%, 82%, 85%, 87%, 90%, 92%, 95%, 97%, 98%, 99% identical to SEQ ID NO: 180, or a polypeptide sequence which is at least 60%, 62%, 65%, 67%, 70%, 72%, 75%, 77%, 80%, 82%, 85%, 87%, 90%, 92%, 95%, 97%, 98%, 99% identical to SEQ ID NO:184.

[0480] In some embodiments, the second heavy chain comprises a polypeptide sequence which is at least 60%, 62%, 65%, 67%, 70%, 72%, 75%, 77%, 80%, 82%, 85%, 87%, 90%, 92%, 95%, 97%, 98%, 99% identical to SEQ ID NO: 53, a polypeptide sequence which is at least 60%, 62%, 65%, 67%, 70%, 72%, 75%, 77%, 80%, 82%, 85%, 87%, 90%, 92%, 95%, 97%, 98%, 99% identical to SEQ ID NO: 57, a polypeptide sequence which is at least 60%, 62%, 65%, 67%, 70%, 72%, 75%, 77%, 80%, 82%, 85%, 87%, 90%, 92%, 95%, 97%, 98%, 99% identical to SEQ ID NO: 69, a polypeptide sequence which is at least 60%, 62%, 65%, 67%, 70%, 72%, 75%, 77%, 80%, 82%, 85%, 87%, 90%, 92%, 95%, 97%, 98%, 99% identical to SEQ ID NO: 73, a polypeptide sequence which is at least 60%, 62%, 65%, 67%, 70%, 72%, 75%, 77%, 80%, 82%, 85%, 87%, 90%, 92%, 95%, 97%, 98%, 99% identical to SEQ ID NO: 77, a polypeptide sequence which is at least 60%, 62%, 65%, 67%, 70%, 72%, 75%, 77%, 80%, 82%, 85%, 87%, 90%, 92%, 95%, 97%, 98%, 99% identical to SEQ ID NO: 81, a polypeptide sequence which is at least 60%, 62%, 65%, 67%, 70%, 72%, 75%, 77%, 80%, 82%, 85%, 87%, 90%, 92%, 95%, 97%, 98%, 99% identical to SEQ ID NO: 85, a polypeptide sequence which is at least 60%, 62%, 65%, 67%, 70%, 72%, 75%, 77%, 80%, 82%, 85%, 87%, 90%, 92%, 95%, 97%, 98%, 99% identical to SEQ ID NO: 89, a polypeptide sequence which is at least 60%, 62%, 65%, 67%, 70%, 72%, 75%, 77%, 80%, 82%, 85%, 87%, 90%, 92%, 95%, 97%, 98%, 99% identical to SEQ ID NO: 93, a polypeptide sequence which is at least 60%, 62%, 65%, 67%, 70%, 72%, 75%, 77%, 80%, 82%, 85%, 87%, 90%, 92%, 95%, 97%, 98%, 99% identical to SEQ ID NO: 97, a polypeptide sequence which is at least 60%, 62%, 65%, 67%, 70%, 72%, 75%, 77%, 80%, 82%, 85%, 87%, 90%, 92%, 95%, 97%, 98%, 99% identical to SEQ ID NO: 101, a polypeptide sequence which is at least 60%, 62%, 65%, 67%, 70%, 72%, 75%, 77%, 80%, 82%, 85%, 87%, 90%, 92%, 95%, 97%, 98%, 99% identical to SEQ ID NO: 105, a polypeptide sequence which is at least 60%, 62%, 65%, 67%, 70%, 72%, 75%, 77%, 80%, 82%, 85%, 87%, 90%, 92%, 95%, 97%, 98%, 99% identical to SEQ ID NO: 109, a polypeptide sequence which is at least 60%, 62%, 65%, 67%, 70%, 72%, 75%, 77%, 80%, 82%, 85%, 87%, 90%, 92%, 95%, 97%, 98%, 99% identical to SEQ ID NO: 117, a polypeptide sequence which is at least 60%, 62%, 65%, 67%, 70%, 72%, 75%, 77%, 80%, 82%, 85%, 87%, 90%, 92%, 95%, 97%, 98%, 99% identical to SEQ ID NO: 121, a polypeptide sequence which is at least 60%, 62%, 65%, 67%, 70%, 72%, 75%, 77%, 80%, 82%, 85%, 87%, 90%, 92%, 95%, 97%, 98%, 99% identical to SEQ ID NO: 125, a polypeptide sequence which is at least 60%, 62%, 65%, 67%, 70%, 72%, 75%, 77%, 80%, 82%, 85%, 87%, 90%, 92%, 95%, 97%, 98%, 99% identical to SEQ ID NO: 129, a polypeptide sequence which is at least 60%, 62%, 65%, 67%, 70%, 72%, 75%, 77%, 80%, 82%, 85%, 87%, 90%, 92%, 95%, 97%, 98%, 99% identical to SEQ ID NO: 133, a polypeptide sequence which is at least 60%, 62%, 65%, 67%, 70%, 72%, 75%, 77%, 80%, 82%, 85%, 87%, 90%, 92%, 95%, 97%, 98%, 99% identical to SEQ ID NO: 141, a polypeptide sequence which is at least 60%, 62%, 65%, 67%, 70%, 72%, 75%, 77%, 80%, 82%, 85%, 87%, 90%, 92%, 95%, 97%, 98%, 99% identical to SEQ ID NO: 145, a polypeptide sequence which is at least 60%, 62%, 65%, 67%, 70%, 72%, 75%, 77%, 80%, 82%, 85%, 87%, 90%, 92%, 95%, 97%, 98%, 99% identical to SEQ ID NO: 149, a polypeptide sequence which is at least 60%, 62%, 65%, 67%, 70%, 72%, 75%, 77%, 80%, 82%, 85%, 87%, 90%, 92%, 95%, 97%, 98%, 99% identical to SEQ ID NO: 153, a polypeptide sequence which is at least 60%, 62%, 65%, 67%, 70%, 72%, 75%, 77%, 80%, 82%, 85%, 87%, 90%, 92%, 95%, 97%, 98%, 99% identical to SEQ ID NO: 157, a polypeptide sequence which is at least 60%, 62%, 65%, 67%, 70%, 72%, 75%, 77%, 80%, 82%, 85%, 87%, 90%, 92%, 95%, 97%, 98%, 99% identical to SEQ ID NO: 161, a polypeptide sequence which is at least 60%, 62%, 65%, 67%, 70%, 72%, 75%, 77%, 80%, 82%, 85%, 87%, 90%, 92%, 95%, 97%, 98%, 99% identical to SEQ ID NO: 165, a polypeptide sequence which is at least 60%, 62%, 65%, 67%, 70%, 72%, 75%, 77%, 80%, 82%, 85%, 87%, 90%, 92%, 95%, 97%, 98%, 99% identical to SEQ ID NO: 169, a polypeptide sequence which is at least 60%, 62%, 65%, 67%, 70%, 72%, 75%, 77%, 80%, 82%, 85%, 87%, 90%, 92%, 95%, 97%, 98%, 99% identical to SEQ ID NO: 173, a polypeptide sequence which is at least 60%, 62%, 65%, 67%, 70%, 72%, 75%, 77%, 80%, 82%, 85%, 87%, 90%, 92%, 95%, 97%, 98%, 99% identical to SEQ ID NO: 177, a polypeptide sequence which is at least 60%, 62%, 65%, 67%, 70%, 72%, 75%, 77%, 80%, 82%, 85%, 87%, 90%, 92%, 95%, 97%, 98%, 99% identical to SEQ ID NO: 181, or a polypeptide sequence which is at least 60%, 62%, 65%, 67%, 70%, 72%, 75%, 77%, 80%, 82%, 85%, 87%, 90%, 92%, 95%, 97%, 98%, 99% identical to SEQ ID NO: 185.

[0481] In some embodiments, the second light chain comprises a polypeptide sequence which is at least 60%, 62%, 65%, 67%, 70%, 72%, 75%, 77%, 80%, 82%, 85%, 87%, 90%, 92%, 95%, 97%, 98%, 99% identical to SEQ ID NO: 54, a polypeptide sequence which is at least 60%, 62%, 65%, 67%, 70%, 72%, 75%, 77%, 80%, 82%, 85%, 87%, 90%, 92%, 95%, 97%, 98%, 99% identical to SEQ ID NO: 58, a polypeptide sequence which is at least 60%, 62%, 65%, 67%, 70%, 72%, 75%, 77%, 80%, 82%, 85%, 87%, 90%, 92%, 95%, 97%, 98%, 99% identical to SEQ ID NO: 70, a polypeptide sequence which is at least 60%, 62%, 65%, 67%, 70%, 72%, 75%, 77%, 80%, 82%, 85%, 87%, 90%, 92%, 95%, 97%, 98%, 99% identical to SEQ ID NO: 74, a polypeptide sequence which is at least 60%, 62%, 65%, 67%, 70%, 72%, 75%, 77%, 80%, 82%, 85%, 87%, 90%, 92%, 95%, 97%, 98%, 99% identical to SEQ ID NO: 78, a polypeptide sequence which is at least 60%, 62%, 65%, 67%, 70%, 72%, 75%, 77%, 80%, 82%, 85%, 87%, 90%, 92%, 95%, 97%, 98%, 99% identical to SEQ ID NO: 82, a polypeptide sequence which is at least 60%, 62%, 65%, 67%, 70%, 72%, 75%, 77%, 80%, 82%, 85%, 87%, 90%, 92%, 95%, 97%, 98%, 99% identical to SEQ ID NO: 86, a polypeptide sequence which is at least 60%, 62%, 65%, 67%, 70%, 72%, 75%, 77%, 80%, 82%, 85%, 87%, 90%, 92%, 95%, 97%, 98%, 99% identical to SEQ ID NO: 90, a polypeptide sequence which is at least 60%, 62%, 65%, 67%, 70%, 72%, 75%, 77%, 80%, 82%, 85%, 87%, 90%, 92%, 95%, 97%, 98%, 99% identical to SEQ ID NO: 94, a polypeptide sequence which is at least 60%, 62%, 65%, 67%, 70%, 72%, 75%, 77%, 80%, 82%, 85%, 87%, 90%, 92%, 95%, 97%, 98%, 99% identical to SEQ ID NO: 98, a polypeptide sequence which is at least 60%, 62%, 65%, 67%, 70%, 72%, 75%, 77%, 80%, 82%, 85%, 87%, 90%, 92%, 95%, 97%, 98%, 99% identical to SEQ ID NO: 102, a polypeptide sequence which is at least 60%, 62%, 65%, 67%, 70%, 72%, 75%, 77%, 80%, 82%, 85%, 87%, 90%, 92%, 95%, 97%, 98%, 99% identical to SEQ ID NO: 106, a polypeptide sequence which is at least 60%, 62%, 65%, 67%, 70%, 72%, 75%, 77%, 80%, 82%, 85%, 87%, 90%, 92%, 95%, 97%, 98%, 99% identical to SEQ ID NO: 110, a polypeptide sequence which is at least 60%, 62%, 65%, 67%, 70%, 72%, 75%, 77%, 80%, 82%, 85%, 87%, 90%, 92%, 95%, 97%, 98%, 99% identical to SEQ ID NO: 118, a polypeptide sequence which is at least 60%, 62%, 65%, 67%, 70%, 72%, 75%, 77%, 80%, 82%, 85%, 87%, 90%, 92%, 95%, 97%, 98%, 99% identical to SEQ ID NO: 122, a polypeptide sequence which is at least 60%, 62%, 65%, 67%, 70%, 72%, 75%, 77%, 80%, 82%, 85%, 87%, 90%, 92%, 95%, 97%, 98%, 99% identical to SEQ ID NO: 126, a polypeptide sequence which is at least 60%, 62%, 65%, 67%, 70%, 72%, 75%, 77%, 80%, 82%, 85%, 87%, 90%, 92%, 95%, 97%, 98%, 99% identical to SEQ ID NO: 130, a polypeptide sequence which is at least 60%, 62%, 65%, 67%, 70%, 72%, 75%, 77%, 80%, 82%, 85%, 87%, 90%, 92%, 95%, 97%, 98%, 99% identical to SEQ ID NO: 134, a polypeptide sequence which is at least 60%, 62%, 65%, 67%, 70%, 72%, 75%, 77%, 80%, 82%, 85%, 87%, 90%, 92%, 95%, 97%, 98%, 99% identical to SEQ ID NO: 142, a polypeptide sequence which is at least 60%, 62%, 65%, 67%, 70%, 72%, 75%, 77%, 80%, 82%, 85%, 87%, 90%, 92%, 95%, 97%, 98%, 99% identical to SEQ ID NO: 146, a polypeptide sequence which is at least 60%, 62%, 65%, 67%, 70%, 72%, 75%, 77%, 80%, 82%, 85%, 87%, 90%, 92%, 95%, 97%, 98%, 99% identical to SEQ ID NO: 150, a polypeptide sequence which is at least 60%, 62%, 65%, 67%, 70%, 72%, 75%, 77%, 80%, 82%, 85%, 87%, 90%, 92%, 95%, 97%, 98%, 99% identical to SEQ ID NO: 154, a polypeptide sequence which is at least 60%, 62%, 65%, 67%, 70%, 72%, 75%, 77%, 80%, 82%, 85%, 87%, 90%, 92%, 95%, 97%, 98%, 99% identical to SEQ ID NO: 158, a polypeptide sequence which is at least 60%, 62%, 65%, 67%, 70%, 72%, 75%, 77%, 80%, 82%, 85%, 87%, 90%, 92%, 95%, 97%, 98%, 99% identical to SEQ ID NO: 162, a polypeptide sequence which is at least 60%, 62%, 65%, 67%, 70%, 72%, 75%, 77%, 80%, 82%, 85%, 87%, 90%, 92%, 95%, 97%, 98%, 99% identical to SEQ ID NO: 166, a polypeptide sequence which is at least 60%, 62%, 65%, 67%, 70%, 72%, 75%, 77%, 80%, 82%, 85%, 87%, 90%, 92%, 95%, 97%, 98%, 99% identical to SEQ ID NO: 170, a polypeptide sequence which is at least 60%, 62%, 65%, 67%, 70%, 72%, 75%, 77%, 80%, 82%, 85%, 87%, 90%, 92%, 95%, 97%, 98%, 99% identical to SEQ ID NO: 174, a polypeptide sequence which is at least 60%, 62%, 65%, 67%, 70%, 72%, 75%, 77%, 80%, 82%, 85%, 87%, 90%, 92%, 95%, 97%, 98%, 99% identical to SEQ ID NO: 178, a polypeptide sequence which is at least 60%, 62%, 65%, 67%, 70%, 72%, 75%, 77%, 80%, 82%, 85%, 87%, 90%, 92%, 95%, 97%, 98%, 99% identical to SEQ ID NO: 182, or a polypeptide sequence which is at least 60%, 62%, 65%, 67%, 70%, 72%, 75%, 77%, 80%, 82%, 85%, 87%, 90%, 92%, 95%, 97%, 98%, 99% identical to SEQ ID NO: 186.

[0482] In some embodiments, the variable domain of the first heavy chain comprises a polypeptide sequence which is at least 60%, 62%, 65%, 67%, 70%, 72%, 75%, 77%, 80%, 82%, 85%, 87%, 90%, 92%, 95%, 97%, 98%, 99% identical to SEQ ID NO: 15, a polypeptide sequence which is at least 60%, 62%, 65%, 67%, 70%, 72%, 75%, 77%, 80%, 82%, 85%, 87%, 90%, 92%, 95%, 97%, 98%, 99% identical to SEQ ID NO: 27, a polypeptide sequence which is at least 60%, 62%, 65%, 67%, 70%, 72%, 75%, 77%, 80%, 82%, 85%, 87%, 90%, 92%, 95%, 97%, 98%, 99% identical to SEQ ID NO: 35, a polypeptide sequence which is at least 60%, 62%, 65%, 67%, 70%, 72%, 75%, 77%, 80%, 82%, 85%, 87%, 90%, 92%, 95%, 97%, 98%, 99% identical to SEQ ID NO: 25, a polypeptide sequence which is at least 60%, 62%, 65%, 67%, 70%, 72%, 75%, 77%, 80%, 82%, 85%, 87%, 90%, 92%, 95%, 97%, 98%, 99% identical to SEQ ID NO: 17, a polypeptide sequence which is at least 60%, 62%, 65%, 67%, 70%, 72%, 75%, 77%, 80%, 82%, 85%, 87%, 90%, 92%, 95%, 97%, 98%, 99% identical to SEQ ID NO: 37, a polypeptide sequence which is at least 60%, 62%, 65%, 67%, 70%, 72%, 75%, 77%, 80%, 82%, 85%, 87%, 90%, 92%, 95%, 97%, 98%, 99% identical to SEQ ID NO: 19, a polypeptide sequence which is at least 60%, 62%, 65%, 67%, 70%, 72%, 75%, 77%, 80%, 82%, 85%, 87%, 90%, 92%, 95%, 97%, 98%, 99% identical to SEQ ID NO: 13, a polypeptide sequence which is at least 60%, 62%, 65%, 67%, 70%, 72%, 75%, 77%, 80%, 82%, 85%, 87%, 90%, 92%, 95%, 97%, 98%, 99% identical to SEQ ID NO: 5, a polypeptide sequence which is at least 60%, 62%, 65%, 67%, 70%, 72%, 75%, 77%, 80%, 82%, 85%, 87%, 90%, 92%, 95%, 97%, 98%, 99% identical to SEQ ID NO: 21, or a polypeptide sequence which is at least 60%, 62%, 65%, 67%, 70%, 72%, 75%, 77%, 80%, 82%, 85%, 87%, 90%, 92%, 95%, 97%, 98%, 99% identical to SEQ ID NO: 41.

[0483] In some embodiments, the variable domain of the first light chain comprises a polypeptide sequence which is at least 60%, 62%, 65%, 67%, 70%, 72%, 75%, 77%, 80%, 82%, 85%, 87%, 90%, 92%, 95%, 97%, 98%, 99% identical to SEQ ID NO: 16, a polypeptide sequence which is at least 60%, 62%, 65%, 67%, 70%, 72%, 75%, 77%, 80%, 82%, 85%, 87%, 90%, 92%, 95%, 97%, 98%, 99% identical to SEQ ID NO: 28, a polypeptide sequence which is at least 60%, 62%, 65%, 67%, 70%, 72%, 75%, 77%, 80%, 82%, 85%, 87%, 90%, 92%, 95%, 97%, 98%, 99% identical to SEQ ID NO: 36, a polypeptide sequence which is at least 60%, 62%, 65%, 67%, 70%, 72%, 75%, 77%, 80%, 82%, 85%, 87%, 90%, 92%, 95%, 97%, 98%, 99% identical to SEQ ID NO: 26, a polypeptide sequence which is at least 60%, 62%, 65%, 67%, 70%, 72%, 75%, 77%, 80%, 82%, 85%, 87%, 90%, 92%, 95%, 97%, 98%, 99% identical to SEQ ID NO: 18, a polypeptide sequence which is at least 60%, 62%, 65%, 67%, 70%, 72%, 75%, 77%, 80%, 82%, 85%, 87%, 90%, 92%, 95%, 97%, 98%, 99% identical to SEQ ID NO: 38, a polypeptide sequence which is at least 60%, 62%, 65%, 67%, 70%, 72%, 75%, 77%, 80%, 82%, 85%, 87%, 90%, 92%, 95%, 97%, 98%, 99% identical to SEQ ID NO: 20, a polypeptide sequence which is at least 60%, 62%, 65%, 67%, 70%, 72%, 75%, 77%, 80%, 82%, 85%, 87%, 90%, 92%, 95%, 97%, 98%, 99% identical to SEQ ID NO: 14, a polypeptide sequence which is at least 60%, 62%, 65%, 67%, 70%, 72%, 75%, 77%, 80%, 82%, 85%, 87%, 90%, 92%, 95%, 97%, 98%, 99% identical to SEQ ID NO: 6, a polypeptide sequence which is at least 60%, 62%, 65%, 67%, 70%, 72%, 75%, 77%, 80%, 82%, 85%, 87%, 90%, 92%, 95%, 97%, 98%, 99% identical to SEQ ID NO: 22, or a polypeptide sequence which is at least 60%, 62%, 65%, 67%, 70%, 72%, 75%, 77%, 80%, 82%, 85%, 87%, 90%, 92%, 95%, 97%, 98%, 99% identical to SEQ ID NO: 42.

[0484] In some embodiments, the variable domain of the second heavy chain comprises a polypeptide sequence which is at least 60%, 62%, 65%, 67%, 70%, 72%, 75%, 77%, 80%, 82%, 85%, 87%, 90%, 92%, 95%, 97%, 98%, 99% identical to SEQ ID NO: 27, a polypeptide sequence which is at least 60%, 62%, 65%, 67%, 70%, 72%, 75%, 77%, 80%, 82%, 85%, 87%, 90%, 92%, 95%, 97%, 98%, 99% identical to SEQ ID NO: 15, a polypeptide sequence which is at least 60%, 62%, 65%, 67%, 70%, 72%, 75%, 77%, 80%, 82%, 85%, 87%, 90%, 92%, 95%, 97%, 98%, 99% identical to SEQ ID NO: 5, a polypeptide sequence which is at least 60%, 62%, 65%, 67%, 70%, 72%, 75%, 77%, 80%, 82%, 85%, 87%, 90%, 92%, 95%, 97%, 98%, 99% identical to SEQ ID NO: 19, a polypeptide sequence which is at least 60%, 62%, 65%, 67%, 70%, 72%, 75%, 77%, 80%, 82%, 85%, 87%, 90%, 92%, 95%, 97%, 98%, 99% identical to SEQ ID NO: 21, a polypeptide sequence which is at least 60%, 62%, 65%, 67%, 70%, 72%, 75%, 77%, 80%, 82%, 85%, 87%, 90%, 92%, 95%, 97%, 98%, 99% identical to SEQ ID NO: 15, a polypeptide sequence which is at least 60%, 62%, 65%, 67%, 70%, 72%, 75%, 77%, 80%, 82%, 85%, 87%, 90%, 92%, 95%, 97%, 98%, 99% identical to SEQ ID NO: 29, a polypeptide sequence which is at least 60%, 62%, 65%, 67%, 70%, 72%, 75%, 77%, 80%, 82%, 85%, 87%, 90%, 92%, 95%, 97%, 98%, 99% identical to SEQ ID NO: 35, a polypeptide sequence which is at least 60%, 62%, 65%, 67%, 70%, 72%, 75%, 77%, 80%, 82%, 85%, 87%, 90%, 92%, 95%, 97%, 98%, 99% identical to SEQ ID NO: 23, a polypeptide sequence which is at least 60%, 62%, 65%, 67%, 70%, 72%, 75%, 77%, 80%, 82%, 85%, 87%, 90%, 92%, 95%, 97%, 98%, 99% identical to SEQ ID NO: 25, a polypeptide sequence which is at least 60%, 62%, 65%, 67%, 70%, 72%, 75%, 77%, 80%, 82%, 85%, 87%, 90%, 92%, 95%, 97%, 98%, 99% identical to SEQ ID NO: 37, a polypeptide sequence which is at least 60%, 62%, 65%, 67%, 70%, 72%, 75%, 77%, 80%, 82%, 85%, 87%, 90%, 92%, 95%, 97%, 98%, 99% identical to SEQ ID NO: 39, a polypeptide sequence which is at least 60%, 62%, 65%, 67%, 70%, 72%, 75%, 77%, 80%, 82%, 85%, 87%, 90%, 92%, 95%, 97%, 98%, 99% identical to SEQ ID NO: 43, or a polypeptide sequence which is at least 60%, 62%, 65%, 67%, 70%, 72%, 75%, 77%, 80%, 82%, 85%, 87%, 90%, 92%, 95%, 97%, 98%, 99% identical to SEQ ID NO: 9.

[0485] In some embodiments, variable domain of the second light chain comprises a polypeptide sequence which is at least 60%, 62%, 65%, 67%, 70%, 72%, 75%, 77%, 80%, 82%, 85%, 87%, 90%, 92%, 95%, 97%, 98%, 99% identical to SEQ ID NO: 28, a polypeptide sequence which is at least 60%, 62%, 65%, 67%, 70%, 72%, 75%, 77%, 80%, 82%, 85%, 87%, 90%, 92%, 95%, 97%, 98%, 99% identical to SEQ ID NO: 16, a polypeptide sequence which is at least 60%, 62%, 65%, 67%, 70%, 72%, 75%, 77%, 80%, 82%, 85%, 87%, 90%, 92%, 95%, 97%, 98%, 99% identical to SEQ ID NO: 6, a polypeptide sequence which is at least 60%, 62%, 65%, 67%, 70%, 72%, 75%, 77%, 80%, 82%, 85%, 87%, 90%, 92%, 95%, 97%, 98%, 99% identical to SEQ ID NO: 20, a polypeptide sequence which is at least 60%, 62%, 65%, 67%, 70%, 72%, 75%, 77%, 80%, 82%, 85%, 87%, 90%, 92%, 95%, 97%, 98%, 99% identical to SEQ ID NO: 22, a polypeptide sequence which is at least 60%, 62%, 65%, 67%, 70%, 72%, 75%, 77%, 80%, 82%, 85%, 87%, 90%, 92%, 95%, 97%, 98%, 99% identical to SEQ ID NO: 16, a polypeptide sequence which is at least 60%, 62%, 65%, 67%, 70%, 72%, 75%, 77%, 80%, 82%, 85%, 87%, 90%, 92%, 95%, 97%, 98%, 99% identical to SEQ ID NO: 30, a polypeptide sequence which is at least 60%, 62%, 65%, 67%, 70%, 72%, 75%, 77%, 80%, 82%, 85%, 87%, 90%, 92%, 95%, 97%, 98%, 99% identical to SEQ ID NO: 36, a polypeptide sequence which is at least 60%, 62%, 65%, 67%, 70%, 72%, 75%, 77%, 80%, 82%, 85%, 87%, 90%, 92%, 95%, 97%, 98%, 99% identical to SEQ ID NO: 24, a polypeptide sequence which is at least 60%, 62%, 65%, 67%, 70%, 72%, 75%, 77%, 80%, 82%, 85%, 87%, 90%, 92%, 95%, 97%, 98%, 99% identical to SEQ ID NO: 26, a polypeptide sequence which is at least 60%, 62%, 65%, 67%, 70%, 72%, 75%, 77%, 80%, 82%, 85%, 87%, 90%, 92%, 95%, 97%, 98%, 99% identical to SEQ ID NO: 38, a polypeptide sequence which is at least 60%, 62%, 65%, 67%, 70%, 72%, 75%, 77%, 80%, 82%, 85%, 87%, 90%, 92%, 95%, 97%, 98%, 99% identical to SEQ ID NO: 40, a polypeptide sequence which is at least 60%, 62%, 65%, 67%, 70%, 72%, 75%, 77%, 80%, 82%, 85%, 87%, 90%, 92%, 95%, 97%, 98%, 99% identical to SEQ ID NO: 44, or a polypeptide sequence which is at least 60%, 62%, 65%, 67%, 70%, 72%, 75%, 77%, 80%, 82%, 85%, 87%, 90%, 92%, 95%, 97%, 98%, 99% identical to SEQ ID NO: 10.

[0486] In some embodiments, the variable domain of the first heavy chain comprises the CDR1, CDR2, and CDR3 of SEQ ID NO: 51; the CDR1, CDR2, and CDR3 of SEQ ID NO: 55; the CDR1, CDR2, and CDR3 of SEQ ID NO: 67; the CDR1, CDR2, and CDR3 of SEQ ID NO: 71; the CDR1, CDR2, and CDR3 of SEQ ID NO: 75; the CDR1, CDR2, and CDR3 of SEQ ID NO: 79; the CDR1, CDR2, and CDR3 of SEQ ID NO: 83; the CDR1, CDR2, and CDR3 of SEQ ID NO: 87; the CDR1, CDR2, and CDR3 of SEQ ID NO: 91; the CDR1, CDR2, and CDR3 of SEQ ID NO: 95; the CDR1, CDR2, and CDR3 of SEQ ID NO: 99; the CDR1, CDR2, and CDR3 of SEQ ID NO: 103; the CDR1, CDR2, and CDR3 of SEQ ID NO: 107; the CDR1, CDR2, and CDR3 of SEQ ID NO: 115; the CDR1, CDR2, and CDR3 of SEQ ID NO: 119, the CDR1, CDR2, and CDR3 of SEQ ID NO: 123, the CDR1, CDR2, and CDR3 of SEQ ID NO: 127; the CDR1, CDR2, and CDR3 of SEQ ID NO: 131; the CDR1, CDR2, and CDR3 of SEQ ID NO: 139; the CDR1, CDR2, and CDR3 of SEQ ID NO: 143; the CDR1, CDR2, and CDR3 of SEQ ID NO: 147; the CDR1, CDR2, and CDR3 of SEQ ID NO: 151; the CDR1, CDR2, and CDR3 of SEQ ID NO: 155; the CDR1, CDR2, and CDR3 of SEQ ID NO: 159; the CDR1, CDR2, and CDR3 of SEQ ID NO: 163; the CDR1, CDR2, and CDR3 of SEQ ID NO: 167, the CDR1, CDR2, and CDR3 of SEQ ID NO: 171, the CDR1, CDR2, and CDR3 of SEQ ID NO: 175, the CDR1, CDR2, and CDR3 of SEQ ID NO: 179, or the CDR1, CDR2, and CDR3 of SEQ ID NO: 183.

[0487] In some embodiments, the variable domain of the first light chain comprises the CDR1, CDR2, and CDR3 of SEQ ID NO: 52; the CDR1, CDR2, and CDR3 of SEQ ID NO: 56; the CDR1, CDR2, and CDR3 of SEQ ID NO: 68; the CDR1, CDR2, and CDR3 of SEQ ID NO: 72; the CDR1, CDR2, and CDR3 of SEQ ID NO: 76; the CDR1, CDR2, and CDR3 of SEQ ID NO: 80; the CDR1, CDR2, and CDR3 of SEQ ID NO: 84; the CDR1, CDR2, and CDR3 of SEQ ID NO: 88; the CDR1, CDR2, and CDR3 of SEQ ID NO: 92; the CDR1, CDR2, and CDR3 of SEQ ID NO: 96; the CDR1, CDR2, and CDR3 of SEQ ID NO: 100; the CDR1, CDR2, and CDR3 of SEQ ID NO: 104; the CDR1, CDR2, and CDR3 of SEQ ID NO: 108; the CDR1, CDR2, and CDR3 of SEQ ID NO: 116; the CDR1, CDR2, and CDR3 of SEQ ID NO: 120; the CDR1, CDR2, and CDR3 of SEQ ID NO: 124; the CDR1, CDR2, and CDR3 of SEQ ID NO: 128; the CDR1, CDR2, and CDR3 of SEQ ID NO: 132; the CDR1, CDR2, and CDR3 of SEQ ID NO: 140; the CDR1, CDR2, and CDR3 of SEQ ID NO: 144; the CDR1, CDR2, and CDR3 of SEQ ID NO: 148; the CDR1, CDR2, and CDR3 of SEQ ID NO: 152; the CDR1, CDR2, and CDR3 of SEQ ID NO: 156; the CDR1, CDR2, and CDR3 of SEQ ID NO: 160; the CDR1, CDR2, and CDR3 of SEQ ID NO: 164; the CDR1, CDR2, and CDR3 of SEQ ID NO: 168, the CDR1, CDR2, and CDR3 of SEQ ID NO: 172, the CDR1, CDR2, and CDR3 of SEQ ID NO: 176, the CDR1, CDR2, and CDR3 of SEQ ID NO: 180, or the CDR1, CDR2, and CDR3 of SEQ ID NO: 184.

[0488] In some embodiments, the variable domain of the second heavy chain comprises the CDR1, CDR2, and CDR3 of SEQ ID NO: 53; the CDR1, CDR2, and CDR3 of SEQ ID NO: 57; the CDR1, CDR2, and CDR3 of SEQ ID NO: 69; the CDR1, CDR2, and CDR3 of SEQ ID NO: 73; the CDR1, CDR2, and CDR3 of SEQ ID NO: 77; the CDR1, CDR2, and CDR3 of SEQ ID NO: 81; the CDR1, CDR2, and CDR3 of SEQ ID NO: 85; the CDR1, CDR2, and CDR3 of SEQ ID NO: 89; the CDR1, CDR2, and CDR3 of SEQ ID NO: 93; the CDR1, CDR2, and CDR3 of SEQ ID NO: 97; the CDR1, CDR2, and CDR3 of SEQ ID NO: 101; the CDR1, CDR2, and CDR3 of SEQ ID NO: 105; the CDR1, CDR2, and CDR3 of SEQ ID NO: 109; the CDR1, CDR2, and CDR3 of SEQ ID NO: 117; the CDR1, CDR2, and CDR3 of SEQ ID NO: 121; the CDR1, CDR2, and CDR3 of SEQ ID NO: 125; the CDR1, CDR2, and CDR3 of SEQ ID NO: 129; the CDR1, CDR2, and CDR3 of SEQ ID NO: 133; the CDR1, CDR2, and CDR3 of SEQ ID NO: 141; the CDR1, CDR2, and CDR3 of SEQ ID NO: 145; the CDR1, CDR2, and CDR3 of SEQ ID NO: 149; the CDR1, CDR2, and CDR3 of SEQ ID NO: 153; the CDR1, CDR2, and CDR3 of SEQ ID NO: 157; the CDR1, CDR2, and CDR3 of SEQ ID NO: 161; the CDR1, CDR2, and CDR3 of SEQ ID NO: 165; the CDR1, CDR2, and CDR3 of SEQ ID NO: 169, the CDR1, CDR2, and CDR3 of SEQ ID NO: 173, the CDR1, CDR2, and CDR3 of SEQ ID NO: 177, the CDR1, CDR2, and CDR3 of SEQ ID NO: 181, or the CDR1, CDR2, and CDR3 of SEQ ID NO: 185.

[0489] In some embodiments, the variable domain of the second light chain comprises the CDR1, CDR2, and CDR3 of SEQ ID NO: 54; the CDR1, CDR2, and CDR3 of SEQ ID NO: 58; the CDR1, CDR2, and CDR3 of SEQ ID NO: 70; the CDR1, CDR2, and CDR3 of SEQ ID NO: 74; the CDR1, CDR2, and CDR3 of SEQ ID NO: 78; the CDR1, CDR2, and CDR3 of SEQ ID NO: 82; the CDR1, CDR2, and CDR3 of SEQ ID NO: 86; the CDR1, CDR2, and CDR3 of SEQ ID NO: 90; the CDR1, CDR2, and CDR3 of SEQ ID NO: 94; the CDR1, CDR2, and CDR3 of SEQ ID NO: 98; the CDR1, CDR2, and CDR3 of SEQ ID NO: 102; the CDR1, CDR2, and CDR3 of SEQ ID NO: 106; the CDR1, CDR2, and CDR3 of SEQ ID NO: 110; the CDR1, CDR2, and CDR3 of SEQ ID NO: 118; the CDR1, CDR2, and CDR3 of SEQ ID NO: 122; the CDR1, CDR2, and CDR3 of SEQ ID NO: 126; the CDR1, CDR2, and CDR3 of SEQ ID NO: 130; the CDR1, CDR2, and CDR3 of SEQ ID NO: 134; the CDR1, CDR2, and CDR3 of SEQ ID NO: 142; the CDR1, CDR2, and CDR3 of SEQ ID NO: 146; the CDR1, CDR2, and CDR3 of SEQ ID NO: 150; the CDR1, CDR2, and CDR3 of SEQ ID NO: 154; the CDR1, CDR2, and CDR3 of SEQ ID NO: 158; the CDR1, CDR2, and CDR3 of SEQ ID NO: 162, the CDR1, CDR2, and CDR3 of SEQ ID NO: 166; the CDR1, CDR2, and CDR3 of SEQ ID NO: 170, the CDR1, CDR2, and CDR3 of SEQ ID NO: 174, the CDR1, CDR2, and CDR3 of SEQ ID NO: 178, the CDR1, CDR2, and CDR3 of SEQ ID NO: 182, or the CDR1, CDR2, and CDR3 of SEQ ID NO: 186.

[0490] In some embodiments, the molecule comprises SEQ ID NO: 51, SEQ ID NO: 52, SEQ ID NO: 53, and SEQ ID NO: 54. In some embodiments, the molecule comprises SEQ ID NO: 55, SEQ ID NO: 56, SEQ ID NO: 57, and SEQ ID NO: 58. In some embodiments, the molecule comprises SEQ ID NO: 67, SEQ ID NO: 68, SEQ ID NO: 69, and SEQ ID NO: 70. In some embodiments, the molecule comprises SEQ ID NO: 71, SEQ ID NO: 72, SEQ ID NO: 73, and SEQ ID NO: 74. In some embodiments, the molecule comprises SEQ ID NO: 75, SEQ ID NO: 76, SEQ ID NO: 77, and SEQ ID NO: 78. In some embodiments, the molecule comprises SEQ ID NO: 79, SEQ ID NO: 80, SEQ ID NO: 81, and SEQ ID NO: 82. In some embodiments, the molecule comprises SEQ ID NO: 83, SEQ ID NO: 84, SEQ ID NO: 85, and SEQ ID NO: 86. In some embodiments, the molecule comprises SEQ ID NO: 87, SEQ ID NO: 88, SEQ ID NO: 89, and SEQ ID NO: 90. In some embodiments, the molecule comprises SEQ ID NO: 91, SEQ ID NO: 92, SEQ ID NO: 93, and SEQ ID NO: 94. In some embodiments, the molecule comprises SEQ ID NO: 95, SEQ ID NO: 96, SEQ ID NO: 97, and SEQ ID NO: 98. In some embodiments, the molecule comprises SEQ ID NO: 99, SEQ ID NO: 100, SEQ ID NO: 101, and SEQ ID NO: 102. In some embodiments, the molecule comprises SEQ ID NO: 103, SEQ ID NO: 104, SEQ ID NO: 105, and SEQ ID NO: 106. In some embodiments, the molecule comprises SEQ ID NO: 107, SEQ ID NO: 108, SEQ ID NO: 109, and SEQ ID NO: 110. In some embodiments, the molecule comprises SEQ ID NO: 115, SEQ ID NO: 116, SEQ ID NO: 117, and SEQ ID NO: 118.

[0491] In some embodiments, the molecule comprises SEQ ID NO: 119, SEQ ID NO: 120, SEQ ID NO: 121, and SEQ ID NO: 122. In some embodiments, the molecule comprises SEQ ID NO: 123, SEQ ID NO: 124, SEQ ID NO: 125, and SEQ ID NO: 126. In some embodiments, the molecule comprises SEQ ID NO: 127, SEQ ID NO: 128, SEQ ID NO: 129, and SEQ ID NO: 130. In some embodiments, the molecule comprises SEQ ID NO: 131, SEQ ID NO: 132, SEQ ID NO: 133, and SEQ ID NO: 133. In some embodiments, the molecule comprises SEQ ID NO: 139, SEQ ID NO: 140, SEQ ID NO: 141, and SEQ ID NO: 142. In some embodiments, the molecule comprises SEQ ID NO: 143, SEQ ID NO: 144, SEQ ID NO: 145, and SEQ ID NO: 146. In some embodiments, the molecule comprises SEQ ID NO: 147, SEQ ID NO: 148, SEQ ID NO: 149, and SEQ ID NO: 150. In some embodiments, the molecule comprises SEQ ID NO: 151, SEQ ID NO: 152, SEQ ID NO: 153, and SEQ ID NO: 154. In some embodiments, the molecule comprises SEQ ID NO: 155, SEQ ID NO: 156, SEQ ID NO: 157, and SEQ ID NO: 158. In some embodiments, the molecule comprises SEQ ID NO: 159, SEQ ID NO: 160, SEQ ID NO: 161, and SEQ ID NO: 162. In some embodiments, the molecule comprises SEQ ID NO: 163, SEQ ID NO: 164, SEQ ID NO: 165, and SEQ ID NO: 166. In some embodiments, the molecule comprises SEQ ID NO: 167, SEQ ID NO: 168, SEQ ID NO: 169, and SEQ ID NO: 170. In some embodiments, the molecule comprises SEQ ID NO: 171, SEQ ID NO: 172, SEQ ID NO: 173, and SEQ ID NO: 174. In some embodiments, the molecule comprises SEQ ID NO: 175, SEQ ID NO: 176, SEQ ID NO: 177, and SEQ ID NO: 178. In some embodiments, the molecule comprises SEQ ID NO: 179, SEQ ID NO: 180, SEQ ID NO: 181, and SEQ ID NO: 182. In some embodiments, the molecule comprises SEQ ID NO: 183, SEQ ID NO: 184, SEQ ID NO: 185, and SEQ ID NO: 186.

[0492] In some embodiments, the molecule further comprises one or more disulfide bonds. In some embodiments, the molecule further comprises one or more linker sequences. In some embodiments, the molecule is capable of neutralizing a coronavirus. In some embodiments, the coronavirus is a SARS-CoV-2 virus. In some embodiments, the SARS-CoV-2 virus strain is selected from the group consisting of WA1, B.1.1.7, B1.526, B1.351, P1, B1.352, and B.1.427. In some embodiments, the molecule specifically recognizes a first epitope and a second epitope on a SARS-CoV-2 particle. In some embodiments, the first epitope comprises at least a portion of a receptor binding domain (RBD) on a spike protein of a SARS-CoV-2 particle. In some embodiments, the second epitope comprises at least a portion of a N-terminal domain (NTD) on a spike protein of a SARS-CoV-2 particle. In some embodiments, the composition is administered in combination with a second therapeutic agent.

[0493] In certain aspects, the invention provides a synthesized monoclonal antibody, or a functional fragment thereof, comprising a heavy chain having a variable domain and a constant domain and a light chain having a variable domain and a constant domain, wherein the antibody binds an antigen on a coronavirus particle.

[0494] In some embodiments, the heavy chain variable domain comprises a polypeptide sequence which is at least 60%, 62%, 65%, 67%, 70%, 72%, 75%, 77%, 80%, 82%, 85%, 87%, 90%, 92%, 95%, 97%, 98%, 99% identical to SEQ ID NO: 5. In some embodiments, the heavy chain variable domain comprises a polypeptide sequence which is at least 60%, 62%, 65%, 67%, 70%, 72%, 75%, 77%, 80%, 82%, 85%, 87%, 90%, 92%, 95%, 97%, 98%, 99% identical to SEQ ID NO: 41. In some embodiments, the heavy chain variable domain comprises a polypeptide sequence which is at least 60%, 62%, 65%, 67%, 70%, 72%, 75%, 77%, 80%, 82%, 85%, 87%, 90%, 92%, 95%, 97%, 98%, 99% identical to SEQ ID NO: 35. In some embodiments, the heavy chain variable domain comprises a polypeptide sequence which is at least 60%, 62%, 65%, 67%, 70%, 72%, 75%, 77%, 80%, 82%, 85%, 87%, 90%, 92%, 95%, 97%, 98%, 99% identical to SEQ ID NO: 1. In some embodiments, the heavy chain variable domain comprises a polypeptide sequence which is at least 60%, 62%, 65%, 67%, 70%, 72%, 75%, 77%, 80%, 82%, 85%, 87%, 90%, 92%, 95%, 97%, 98%, 99% identical to SEQ ID NO: 23. In some embodiments, the heavy chain variable domain comprises a polypeptide sequence which is at least 60%, 62%, 65%, 67%, 70%, 72%, 75%, 77%, 80%, 82%, 85%, 87%, 90%, 92%, 95%, 97%, 98%, 99% identical to SEQ ID NO: 13.

[0495] In some embodiments, the heavy chain variable domain comprises a polypeptide sequence which is at least 60%, 62%, 65%, 67%, 70%, 72%, 75%, 77%, 80%, 82%, 85%, 87%, 90%, 92%, 95%, 97%, 98%, 99% identical to SEQ ID NO: 27. In some embodiments, the light chain variable domain comprises a polypeptide sequence which is at least 60%, 62%, 65%, 67%, 70%, 72%, 75%, 77%, 80%, 82%, 85%, 87%, 90%, 92%, 95%, 97%, 98%, 99% identical to SEQ ID NO: 6. In some embodiments, the light chain variable domain comprises a polypeptide sequence which is at least 60%, 62%, 65%, 67%, 70%, 72%, 75%, 77%, 80%, 82%, 85%, 87%, 90%, 92%, 95%, 97%, 98%, 99% identical to SEQ ID NO: 42. In some embodiments, the light chain variable domain comprises a polypeptide sequence which is at least 60%, 62%, 65%, 67%, 70%, 72%, 75%, 77%, 80%, 82%, 85%, 87%, 90%, 92%, 95%, 97%, 98%, 99% identical to SEQ ID NO: 36. In some embodiments, the light chain variable domain comprises a polypeptide sequence which is at least 60%, 62%, 65%, 67%, 70%, 72%, 75%, 77%, 80%, 82%, 85%, 87%, 90%, 92%, 95%, 97%, 98%, 99% identical to SEQ ID NO: 2.

[0496] In some embodiments, the light chain variable domain comprises a polypeptide sequence which is at least 60%, 62%, 65%, 67%, 70%, 72%, 75%, 77%, 80%, 82%, 85%, 87%, 90%, 92%, 95%, 97%, 98%, 99% identical to SEQ ID NO: 24. In some embodiments, the light chain variable domain comprises a polypeptide sequence which is at least 60%, 62%, 65%, 67%, 70%, 72%, 75%, 77%, 80%, 82%, 85%, 87%, 90%, 92%, 95%, 97%, 98%, 99% identical to SEQ ID NO: 14. In some embodiments, the light chain variable domain comprises a polypeptide sequence which is at least 60%, 62%, 65%, 67%, 70%, 72%, 75%, 77%, 80%, 82%, 85%, 87%, 90%, 92%, 95%, 97%, 98%, 99% identical to SEQ ID NO: 28. In some embodiments, the heavy chain variable domain comprises a polypeptide sequence which is at least 60%, 62%, 65%, 67%, 70%, 72%, 75%, 77%, 80%, 82%, 85%, 87%, 90%, 92%, 95%, 97%, 98%, 99% identical to SEQ ID NO: 5 and the light chain variable domain comprises a polypeptide sequence which is at least 60%, 62%, 65%, 67%, 70%, 72%, 75%, 77%, 80%, 82%, 85%, 87%, 90%, 92%, 95%, 97%, 98%, 99% identical to SEQ ID NO: 6. In some embodiments, the heavy chain variable domain comprises a polypeptide sequence which is at least 60%, 62%, 65%, 67%, 70%, 72%, 75%, 77%, 80%, 82%, 85%, 87%, 90%, 92%, 95%, 97%, 98%, 99% identical to SEQ ID NO: 41 and the light chain variable domain comprises a polypeptide sequence which is at least 60%, 62%, 65%, 67%, 70%, 72%, 75%, 77%, 80%, 82%, 85%, 87%, 90%, 92%, 95%, 97%, 98%, 99% identical to SEQ ID NO: 42. In some embodiments, the heavy chain variable domain comprises a polypeptide sequence which is at least 60%, 62%, 65%, 67%, 70%, 72%, 75%, 77%, 80%, 82%, 85%, 87%, 90%, 92%, 95%, 97%, 98%, 99% identical to SEQ ID NO: 35 and the light chain variable domain comprises a polypeptide sequence which is at least 60%, 62%, 65%, 67%, 70%, 72%, 75%, 77%, 80%, 82%, 85%, 87%, 90%, 92%, 95%, 97%, 98%, 99% identical to SEQ ID NO: 36.

[0497] In some embodiments, the heavy chain variable domain comprises a polypeptide sequence which is at least 60%, 62%, 65%, 67%, 70%, 72%, 75%, 77%, 80%, 82%, 85%, 87%, 90%, 92%, 95%, 97%, 98%, 99% identical to SEQ ID NO: 1 and the light chain variable domain comprises a polypeptide sequence which is at least 60%, 62%, 65%, 67%, 70%, 72%, 75%, 77%, 80%, 82%, 85%, 87%, 90%, 92%, 95%, 97%, 98%, 99% identical to SEQ ID NO: 2. In some embodiments, the heavy chain variable domain comprises a polypeptide sequence which is at least 60%, 62%, 65%, 67%, 70%, 72%, 75%, 77%, 80%, 82%, 85%, 87%, 90%, 92%, 95%, 97%, 98%, 99% identical to SEQ ID NO: 23 and the light chain variable domain comprises a polypeptide sequence which is at least 60%, 62%, 65%, 67%, 70%, 72%, 75%, 77%, 80%, 82%, 85%, 87%, 90%, 92%, 95%, 97%, 98%, 99% identical to SEQ ID NO: 24. In some embodiments, the heavy chain variable domain comprises a polypeptide sequence which is at least 60%, 62%, 65%, 67%, 70%, 72%, 75%, 77%, 80%, 82%, 85%, 87%, 90%, 92%, 95%, 97%, 98%, 99% identical to SEQ ID NO: 13 and the light chain variable domain comprises a polypeptide sequence which is at least 60%, 62%, 65%, 67%, 70%, 72%, 75%, 77%, 80%, 82%, 85%, 87%, 90%, 92%, 95%, 97%, 98%, 99% identical to SEQ ID NO: 14. In some embodiments, the heavy chain variable domain comprises a polypeptide sequence which is at least 60%, 62%, 65%, 67%, 70%, 72%, 75%, 77%, 80%, 82%, 85%, 87%, 90%, 92%, 95%, 97%, 98%, 99% identical to SEQ ID NO: 27 and the light chain variable domain comprises a polypeptide sequence which is at least 60%, 62%, 65%, 67%, 70%, 72%, 75%, 77%, 80%, 82%, 85%, 87%, 90%, 92%, 95%, 97%, 98%, 99% identical to SEQ ID NO: 28.

[0498] In some embodiments, the heavy chain variable domain comprises SEQ ID NO: 5 and the light chain variable domain comprises SEQ ID NO: 6. In some embodiments, the heavy chain variable domain comprises SEQ ID NO: 41 and the light chain variable domain comprises SEQ ID NO: 42. In some embodiments, the heavy chain variable domain comprises SEQ ID NO: 35 and the light chain variable domain comprises SEQ ID NO: 36. In some embodiments, the heavy chain variable domain comprises SEQ ID NO: 1 and the light chain variable domain comprises SEQ ID NO: 2. In some embodiments, the heavy chain variable domain comprises SEQ ID NO: 23 and the light chain variable domain comprises SEQ ID NO: 24. In some embodiments, the heavy chain variable domain comprises SEQ ID NO: 13 and the light chain variable domain comprises SEQ ID NO: 14. In some embodiments, the heavy chain variable domain comprises SEQ ID NO: 27 and the light chain variable domain comprises SEQ ID NO: 28. In some embodiments, the heavy chain variable domain comprises the CDR1, CDR2, and CDR3 regions of SEQ ID NO: 5. In some embodiments, the heavy chain variable domain comprises the CDR1, CDR2, and CDR3 regions of SEQ ID NO: 41. In some embodiments, the heavy chain variable domain comprises the CDR1, CDR2, and CDR3 regions of SEQ ID NO: 1.

[0499] In some embodiments, the heavy chain variable domain comprises the CDR1, CDR2, and CDR3 regions of SEQ ID NO: 23. In some embodiments, the heavy chain variable domain comprises the CDR1, CDR2, and CDR3 regions of SEQ ID NO: 13. In some embodiments, the heavy chain variable domain comprises the CDR1, CDR2, and CDR3 regions of SEQ ID NO: 27.

[0500] In some embodiments, the light chain variable domain comprises the CDR1, CDR2, and CDR3 regions of SEQ ID NO: 6. In some embodiments, the light chain variable domain comprises the CDR1, CDR2, and CDR3 regions of SEQ ID NO: 42. In some embodiments, the light chain variable domain comprises the CDR1, CDR2, and CDR3 regions of SEQ ID NO: 36. In some embodiments, the light chain variable domain comprises the CDR1, CDR2, and CDR3 regions of SEQ ID NO: 2. In some embodiments, the light chain variable domain comprises the CDR1, CDR2, and CDR3 regions of SEQ ID NO: 24. In some embodiments, the light chain variable domain comprises the CDR1, CDR2, and CDR3 regions of SEQ ID NO: 14. In some embodiments, the light chain variable domain comprises the CDR1, CDR2, and CDR3 regions of SEQ ID NO: 28. In some embodiments, the heavy chain variable domain comprises the CDR1, CDR2, and CDR3 regions of SEQ ID NO: 5 and the light chain variable domain comprises the CDR1, CDR2, and CDR3 regions of SEQ ID NO: 6. In some embodiments, the heavy chain variable domain comprises the CDR1, CDR2, and CDR3 regions of SEQ ID NO: 41 and the light chain variable domain comprises the CDR1, CDR2, and CDR3 regions of SEQ ID NO: 42. In some embodiments, the heavy chain variable domain comprises the CDR1, CDR2, and CDR3 regions of SEQ ID NO: 35 and the light chain variable domain comprises the CDR1, CDR2, and CDR3 regions of SEQ ID NO: 36. In some embodiments, the heavy chain variable domain comprises the CDR1, CDR2, and CDR3 regions of SEQ ID NO: 1 and the light chain variable domain comprises the CDR1, CDR2, and CDR3 regions of SEQ ID NO: 2.

[0501] In some embodiments, the heavy chain variable domain comprises the CDR1, CDR2, and CDR3 regions of SEQ ID NO: 23 and the light chain variable domain comprises the CDR1, CDR2, and CDR3 regions of SEQ ID NO: 24. In some embodiments, the heavy chain variable domain comprises the CDR1, CDR2, and CDR3 regions of SEQ ID NO: 13 and the light chain variable domain comprises the CDR1, CDR2, and CDR3 regions of SEQ ID NO: 14. In some embodiments, the heavy chain variable domain comprises the CDR1, CDR2, and CDR3 regions of SEQ ID NO: 27 and the light chain variable domain comprises the CDR1, CDR2, and CDR3 regions of SEQ ID NO: 28.

[0502] In some embodiments, the antibody neutralizes a coronavirus. In some embodiments, the coronavirus is a SARS-CoV-2 virus. In some embodiments, the coronavirus is a SARS-CoV-2 variant strain. In some embodiments, the variant strain is selected from the group consisting of WA1, B.1.1.7, B1.526, B1.351, P1, B1.352, and B.1.427. In some embodiments, the antibody specifically binds an epitope on the surface of the coronavirus. In some embodiments, the epitope comprises at least a portion of a coronavirus spike protein. In some embodiments, the at least a portion of a coronavirus spike protein comprises a receptor binding domain (RBD) of a spike protein. In some embodiments, the at least a portion of a coronavirus spike protein comprises a N-Terminal domain (NTD) of a spike protein. In some embodiments, the coronavirus is a SARS-CoV-2 coronavirus.

[0503] In certain aspects, the invention provides a method of treating or preventing a COVID-19 infection in a subject in need thereof, the method comprising administering to the subject a therapeutically effective amount of a synthesized monoclonal antibody, or a functional fragment thereof, comprising a heavy chain having a variable domain and a constant domain and a light chain having a variable domain and a constant domain, wherein the antibody binds an antigen on a coronavirus particle.

[0504] In some embodiments, the heavy chain variable domain comprises a polypeptide sequence which is at least 60%, 62%, 65%, 67%, 70%, 72%, 75%, 77%, 80%, 82%, 85%, 87%, 90%, 92%, 95%, 97%, 98%, 99% identical to SEQ ID NO: 5. In some embodiments, the heavy chain variable domain comprises a polypeptide sequence which is at least 60%, 62%, 65%, 67%, 70%, 72%, 75%, 77%, 80%, 82%, 85%, 87%, 90%, 92%, 95%, 97%, 98%, 99% identical to SEQ ID NO: 41. In some embodiments, the heavy chain variable domain comprises a polypeptide sequence which is at least 60%, 62%, 65%, 67%, 70%, 72%, 75%, 77%, 80%, 82%, 85%, 87%, 90%, 92%, 95%, 97%, 98%, 99% identical to SEQ ID NO: 35. In some embodiments, the heavy chain variable domain comprises a polypeptide sequence which is at least 60%, 62%, 65%, 67%, 70%, 72%, 75%, 77%, 80%, 82%, 85%, 87%, 90%, 92%, 95%, 97%, 98%, 99% identical to SEQ ID NO: 1. In some embodiments, the heavy chain variable domain comprises a polypeptide sequence which is at least 60%, 62%, 65%, 67%, 70%, 72%, 75%, 77%, 80%, 82%, 85%, 87%, 90%, 92%, 95%, 97%, 98%, 99% identical to SEQ ID NO: 23. In some embodiments, the heavy chain variable domain comprises a polypeptide sequence which is at least 60%, 62%, 65%, 67%, 70%, 72%, 75%, 77%, 80%, 82%, 85%, 87%, 90%, 92%, 95%, 97%, 98%, 99% identical to SEQ ID NO: 13. In some embodiments, the heavy chain variable domain comprises a polypeptide sequence which is at least 60%, 62%, 65%, 67%, 70%, 72%, 75%, 77%, 80%, 82%, 85%, 87%, 90%, 92%, 95%, 97%, 98%, 99% identical to SEQ ID NO: 27. In some embodiments, the light chain variable domain comprises a polypeptide sequence which is at least 60%, 62%, 65%, 67%, 70%, 72%, 75%, 77%, 80%, 82%, 85%, 87%, 90%, 92%, 95%, 97%, 98%, 99% identical to SEQ ID NO: 6.

[0505] In some embodiments, the light chain variable domain comprises a polypeptide sequence which is at least 60%, 62%, 65%, 67%, 70%, 72%, 75%, 77%, 80%, 82%, 85%, 87%, 90%, 92%, 95%, 97%, 98%, 99% identical to SEQ ID NO: 42. In some embodiments, the light chain variable domain comprises a polypeptide sequence which is at least 60%, 62%, 65%, 67%, 70%, 72%, 75%, 77%, 80%, 82%, 85%, 87%, 90%, 92%, 95%, 97%, 98%, 99% identical to SEQ ID NO: 36. In some embodiments, the light chain variable domain comprises a polypeptide sequence which is at least 60%, 62%, 65%, 67%, 70%, 72%, 75%, 77%, 80%, 82%, 85%, 87%, 90%, 92%, 95%, 97%, 98%, 99% identical to SEQ ID NO: 2. In some embodiments, the light chain variable domain comprises a polypeptide sequence which is at least 60%, 62%, 65%, 67%, 70%, 72%, 75%, 77%, 80%, 82%, 85%, 87%, 90%, 92%, 95%, 97%, 98%, 99% identical to SEQ ID NO: 24. In some embodiments, the light chain variable domain comprises a polypeptide sequence which is at least 60%, 62%, 65%, 67%, 70%, 72%, 75%, 77%, 80%, 82%, 85%, 87%, 90%, 92%, 95%, 97%, 98%, 99% identical to SEQ ID NO: 14. In some embodiments, the light chain variable domain comprises a polypeptide sequence which is at least 60%, 62%, 65%, 67%, 70%, 72%, 75%, 77%, 80%, 82%, 85%, 87%, 90%, 92%, 95%, 97%, 98%, 99% identical to SEQ ID NO: 28.

[0506] In some embodiments, the heavy chain variable domain comprises a polypeptide sequence which is at least 60%, 62%, 65%, 67%, 70%, 72%, 75%, 77%, 80%, 82%, 85%, 87%, 90%, 92%, 95%, 97%, 98%, 99% identical to SEQ ID NO: 5 and the light chain variable domain comprises a polypeptide sequence which is at least 60%, 62%, 65%, 67%, 70%, 72%, 75%, 77%, 80%, 82%, 85%, 87%, 90%, 92%, 95%, 97%, 98%, 99% identical to SEQ ID NO: 6. In some embodiments, the heavy chain variable domain comprises a polypeptide sequence which is at least 60%, 62%, 65%, 67%, 70%, 72%, 75%, 77%, 80%, 82%, 85%, 87%, 90%, 92%, 95%, 97%, 98%, 99% identical to SEQ ID NO: 41 and the light chain variable domain comprises a polypeptide sequence which is at least 60%, 62%, 65%, 67%, 70%, 72%, 75%, 77%, 80%, 82%, 85%, 87%, 90%, 92%, 95%, 97%, 98%, 99% identical to SEQ ID NO: 42. In some embodiments, the heavy chain variable domain comprises a polypeptide sequence which is at least 60%, 62%, 65%, 67%, 70%, 72%, 75%, 77%, 80%, 82%, 85%, 87%, 90%, 92%, 95%, 97%, 98%, 99% identical to SEQ ID NO: 35 and the light chain variable domain comprises a polypeptide sequence which is at least 60%, 62%, 65%, 67%, 70%, 72%, 75%, 77%, 80%, 82%, 85%, 87%, 90%, 92%, 95%, 97%, 98%, 99% identical to SEQ ID NO: 36. In some embodiments, the heavy chain variable domain comprises a polypeptide sequence which is at least 60%, 62%, 65%, 67%, 70%, 72%, 75%, 77%, 80%, 82%, 85%, 87%, 90%, 92%, 95%, 97%, 98%, 99% identical to SEQ ID NO: 1 and the light chain variable domain comprises a polypeptide sequence which is at least 60%, 62%, 65%, 67%, 70%, 72%, 75%, 77%, 80%, 82%, 85%, 87%, 90%, 92%, 95%, 97%, 98%, 99% identical to SEQ ID NO: 2. In some embodiments, the heavy chain variable domain comprises a polypeptide sequence which is at least 60%, 62%, 65%, 67%, 70%, 72%, 75%, 77%, 80%, 82%, 85%, 87%, 90%, 92%, 95%, 97%, 98%, 99% identical to SEQ ID NO: 23 and the light chain variable domain comprises a polypeptide sequence which is at least 60%, 62%, 65%, 67%, 70%, 72%, 75%, 77%, 80%, 82%, 85%, 87%, 90%, 92%, 95%, 97%, 98%, 99% identical to SEQ ID NO: 24.

[0507] In some embodiments, the heavy chain variable domain comprises a polypeptide sequence which is at least 60%, 62%, 65%, 67%, 70%, 72%, 75%, 77%, 80%, 82%, 85%, 87%, 90%, 92%, 95%, 97%, 98%, 99% identical to SEQ ID NO: 13 and the light chain variable domain comprises a polypeptide sequence which is at least 60%, 62%, 65%, 67%, 70%, 72%, 75%, 77%, 80%, 82%, 85%, 87%, 90%, 92%, 95%, 97%, 98%, 99% identical to SEQ ID NO: 14. In some embodiments, the heavy chain variable domain comprises a polypeptide sequence which is at least 60%, 62%, 65%, 67%, 70%, 72%, 75%, 77%, 80%, 82%, 85%, 87%, 90%, 92%, 95%, 97%, 98%, 99% identical to SEQ ID NO: 27 and the light chain variable domain comprises a polypeptide sequence which is at least 60%, 62%, 65%, 67%, 70%, 72%, 75%, 77%, 80%, 82%, 85%, 87%, 90%, 92%, 95%, 97%, 98%, 99% identical to SEQ ID NO: 28.

[0508] In some embodiments, the heavy chain variable domain comprises SEQ ID NO: 5 and the light chain variable domain comprises SEQ ID NO: 6. In some embodiments, the heavy chain variable domain comprises SEQ ID NO: 41 and the light chain variable domain comprises SEQ ID NO: 42. In some embodiments, the heavy chain variable domain comprises SEQ ID NO: 35 and the light chain variable domain comprises SEQ ID NO: 36. In some embodiments, the heavy chain variable domain comprises SEQ ID NO: 1 and the light chain variable domain comprises SEQ ID NO: 2. In some embodiments, the heavy chain variable domain comprises SEQ ID NO: 23 and the light chain variable domain comprises SEQ ID NO: 24. In some embodiments, the heavy chain variable domain comprises SEQ ID NO: 13 and the light chain variable domain comprises SEQ ID NO: 14.

[0509] In some embodiments, the heavy chain variable domain comprises SEQ ID NO: 27 and the light chain variable domain comprises SEQ ID NO: 28. In some embodiments, the heavy chain variable domain comprises the CDR1, CDR2, and CDR3 regions of SEQ ID NO: 5. In some embodiments, the heavy chain variable domain comprises the CDR1, CDR2, and CDR3 regions of SEQ ID NO: 41. In some embodiments, the heavy chain variable domain comprises the CDR1, CDR2, and CDR3 regions of SEQ ID NO: 1. In some embodiments, the heavy chain variable domain comprises the CDR1, CDR2, and CDR3 regions of SEQ ID NO: 23. In some embodiments, the heavy chain variable domain comprises the CDR1, CDR2, and CDR3 regions of SEQ ID NO: 13. In some embodiments, the heavy chain variable domain comprises the CDR1, CDR2, and CDR3 regions of SEQ ID NO: 27. In some embodiments, the light chain variable domain comprises the CDR1, CDR2, and CDR3 regions of SEQ ID NO: 6. In some embodiments, the light chain variable domain comprises the CDR1, CDR2, and CDR3 regions of SEQ ID NO: 42. In some embodiments, the light chain variable domain comprises the CDR1, CDR2, and CDR3 regions of SEQ ID NO: 36. In some embodiments, the light chain variable domain comprises the CDR1, CDR2, and CDR3 regions of SEQ ID NO: 2. In some embodiments, the light chain variable domain comprises the CDR1, CDR2, and CDR3 regions of SEQ ID NO: 24.

[0510] In some embodiments, the light chain variable domain comprises the CDR1, CDR2, and CDR3 regions of SEQ ID NO: 14. In some embodiments, the light chain variable domain comprises the CDR1, CDR2, and CDR3 regions of SEQ ID NO: 28. In some embodiments, the heavy chain variable domain comprises the CDR1, CDR2, and CDR3 regions of SEQ ID NO: 5 and the light chain variable domain comprises the CDR1, CDR2, and CDR3 regions of SEQ ID NO: 6. In some embodiments, the heavy chain variable domain comprises the CDR1, CDR2, and CDR3 regions of SEQ ID NO: 41 and the light chain variable domain comprises the CDR1, CDR2, and CDR3 regions of SEQ ID NO: 42. In some embodiments, the heavy chain variable domain comprises the CDR1, CDR2, and CDR3 regions of SEQ ID NO: 35 and the light chain variable domain comprises the CDR1, CDR2, and CDR3 regions of SEQ ID NO: 36. In some embodiments, the heavy chain variable domain comprises the CDR1, CDR2, and CDR3 regions of SEQ ID NO: 1 and the light chain variable domain comprises the CDR1, CDR2, and CDR3 regions of SEQ ID NO: 2. In some embodiments, the heavy chain variable domain comprises the CDR1, CDR2, and CDR3 regions of SEQ ID NO: 23 and the light chain variable domain comprises the CDR1, CDR2, and CDR3 regions of SEQ ID NO: 24. In some embodiments, the heavy chain variable domain comprises the CDR1, CDR2, and CDR3 regions of SEQ ID NO: 13 and the light chain variable domain comprises the CDR1, CDR2, and CDR3 regions of SEQ ID NO: 14. In some embodiments, the heavy chain variable domain comprises the CDR1, CDR2, and CDR3 regions of SEQ ID NO: 27 and the light chain variable domain comprises the CDR1, CDR2, and CDR3 regions of SEQ ID NO: 28.

[0511] In some embodiments, the antibody neutralizes a coronavirus. In some embodiments, the coronavirus is a SARS-CoV-2 virus. In some embodiments, the coronavirus is a SARS-CoV-2 variant strain. In some embodiments, the variant strain is selected from the group consisting of WA1, B.1.1.7, B1.526, B1.351, P1, B1.352, and B.1.427. In some embodiments, the antibody specifically binds an epitope on the surface of the coronavirus. In some embodiments, the epitope comprises at least a portion of a coronavirus spike protein. In some embodiments, the at least a portion of a coronavirus spike protein comprises a receptor binding domain (RBD) of a spike protein. In some embodiments, the at least a portion of a coronavirus spike protein comprises a N-Terminal domain (NTD) of a spike protein. In some embodiments, the coronavirus is a SARS-CoV-2 coronavirus. In some embodiments, the antibody is administered in combination with a second pharmaceutical agent.

[0512] In certain aspects, the invention provides a bispecific molecule comprising a first polypeptide chain and a second polypeptide chain, wherein: the first polypeptide chain comprises: a first light chain comprising a variable domain and a constant domain; a first heavy chain comprising a variable domain and a constant domain; the second polypeptide chain comprises: a second light chain comprising a variable domain and a constant domain; and a second heavy chain comprising a variable domain and a constant domain. In some embodiments, the first polypeptide chain and the second polypeptide chain are covalently bonded to one another.

[0513] In some embodiments, the first heavy chain comprises a polypeptide sequence which is at least 60%, 62%, 65%, 67%, 70%, 72%, 75%, 77%, 80%, 82%, 85%, 87%, 90%, 92%, 95%, 97%, 98%, 99% identical to SEQ ID NO: 47, a polypeptide sequence which is at least 60%, 62%, 65%, 67%, 70%, 72%, 75%, 77%, 80%, 82%, 85%, 87%, 90%, 92%, 95%, 97%, 98%, 99% identical to SEQ ID NO: 111, a polypeptide sequence which is at least 60%, 62%, 65%, 67%, 70%, 72%, 75%, 77%, 80%, 82%, 85%, 87%, 90%, 92%, 95%, 97%, 98%, 99% identical to SEQ ID NO: 135, a polypeptide sequence which is at least 60%, 62%, 65%, 67%, 70%, 72%, 75%, 77%, 80%, 82%, 85%, 87%, 90%, 92%, 95%, 97%, 98%, 99% identical to SEQ ID NO: 187, or a polypeptide sequence which is at least 60%, 62%, 65%, 67%, 70%, 72%, 75%, 77%, 80%, 82%, 85%, 87%, 90%, 92%, 95%, 97%, 98%, 99% identical to SEQ ID NO: 211. In some embodiments, the first light chain comprises a polypeptide sequence which is at least 60%, 62%, 65%, 67%, 70%, 72%, 75%, 77%, 80%, 82%, 85%, 87%, 90%, 92%, 95%, 97%, 98%, 99% identical to SEQ ID NO: 48, a polypeptide sequence which is at least 60%, 62%, 65%, 67%, 70%, 72%, 75%, 77%, 80%, 82%, 85%, 87%, 90%, 92%, 95%, 97%, 98%, 99% identical to SEQ ID NO: 112, a polypeptide sequence which is at least 60%, 62%, 65%, 67%, 70%, 72%, 75%, 77%, 80%, 82%, 85%, 87%, 90%, 92%, 95%, 97%, 98%, 99% identical to SEQ ID NO: 136, a polypeptide sequence which is at least 60%, 62%, 65%, 67%, 70%, 72%, 75%, 77%, 80%, 82%, 85%, 87%, 90%, 92%, 95%, 97%, 98%, 99% identical to SEQ ID NO: 188, or a polypeptide sequence which is at least 60%, 62%, 65%, 67%, 70%, 72%, 75%, 77%, 80%, 82%, 85%, 87%, 90%, 92%, 95%, 97%, 98%, 99% identical to SEQ ID NO: 212.

[0514] In some embodiments, the second heavy chain comprises a polypeptide sequence which is at least 60%, 62%, 65%, 67%, 70%, 72%, 75%, 77%, 80%, 82%, 85%, 87%, 90%, 92%, 95%, 97%, 98%, 99% identical to SEQ ID NO: 49, a polypeptide sequence which is at least 60%, 62%, 65%, 67%, 70%, 72%, 75%, 77%, 80%, 82%, 85%, 87%, 90%, 92%, 95%, 97%, 98%, 99% identical to SEQ ID NO: 113, a polypeptide sequence which is at least 60%, 62%, 65%, 67%, 70%, 72%, 75%, 77%, 80%, 82%, 85%, 87%, 90%, 92%, 95%, 97%, 98%, 99% identical to SEQ ID NO: 137, a polypeptide sequence which is at least 60%, 62%, 65%, 67%, 70%, 72%, 75%, 77%, 80%, 82%, 85%, 87%, 90%, 92%, 95%, 97%, 98%, 99% identical to SEQ ID NO: 189, or a polypeptide sequence which is at least 60%, 62%, 65%, 67%, 70%, 72%, 75%, 77%, 80%, 82%, 85%, 87%, 90%, 92%, 95%, 97%, 98%, 99% identical to SEQ ID NO: 213. In some embodiments, the second light chain comprises a polypeptide sequence which is at least 60%, 62%, 65%, 67%, 70%, 72%, 75%, 77%, 80%, 82%, 85%, 87%, 90%, 92%, 95%, 97%, 98%, 99% identical to SEQ ID NO: 50, a polypeptide sequence which is at least 60%, 62%, 65%, 67%, 70%, 72%, 75%, 77%, 80%, 82%, 85%, 87%, 90%, 92%, 95%, 97%, 98%, 99% identical to SEQ ID NO: 114, a polypeptide sequence which is at least 60%, 62%, 65%, 67%, 70%, 72%, 75%, 77%, 80%, 82%, 85%, 87%, 90%, 92%, 95%, 97%, 98%, 99% identical to SEQ ID NO: 138, a polypeptide sequence which is at least 60%, 62%, 65%, 67%, 70%, 72%, 75%, 77%, 80%, 82%, 85%, 87%, 90%, 92%, 95%, 97%, 98%, 99% identical to SEQ ID NO: 190, or a polypeptide sequence which is at least 60%, 62%, 65%, 67%, 70%, 72%, 75%, 77%, 80%, 82%, 85%, 87%, 90%, 92%, 95%, 97%, 98%, 99% identical to SEQ ID NO: 214. In some embodiments, the variable domain of the first heavy chain comprises a polypeptide sequence which is at least 60%, 62%, 65%, 67%, 70%, 72%, 75%, 77%, 80%, 82%, 85%, 87%, 90%, 92%, 95%, 97%, 98%, 99% identical to SEQ ID NO: 35, a polypeptide sequence which is at least 60%, 62%, 65%, 67%, 70%, 72%, 75%, 77%, 80%, 82%, 85%, 87%, 90%, 92%, 95%, 97%, 98%, 99% identical to SEQ ID NO: 13.

[0515] In some embodiments, the variable domain of the first light chain comprises a polypeptide sequence which is at least 60%, 62%, 65%, 67%, 70%, 72%, 75%, 77%, 80%, 82%, 85%, 87%, 90%, 92%, 95%, 97%, 98%, 99% identical to SEQ ID NO: 36, a polypeptide sequence which is at least 60%, 62%, 65%, 67%, 70%, 72%, 75%, 77%, 80%, 82%, 85%, 87%, 90%, 92%, 95%, 97%, 98%, 99% identical to SEQ ID NO: 14. In some embodiments, the variable domain of the second heavy chain comprises a polypeptide sequence which is at least 60%, 62%, 65%, 67%, 70%, 72%, 75%, 77%, 80%, 82%, 85%, 87%, 90%, 92%, 95%, 97%, 98%, 99% identical to SEQ ID NO: 13, a polypeptide sequence which is at least 60%, 62%, 65%, 67%, 70%, 72%, 75%, 77%, 80%, 82%, 85%, 87%, 90%, 92%, 95%, 97%, 98%, 99% identical to SEQ ID NO: 45, a polypeptide sequence which is at least 60%, 62%, 65%, 67%, 70%, 72%, 75%, 77%, 80%, 82%, 85%, 87%, 90%, 92%, 95%, 97%, 98%, 99% identical to SEQ ID NO: 43. In some embodiments, the variable domain of the second light chain comprises a polypeptide sequence which is at least 60%, 62%, 65%, 67%, 70%, 72%, 75%, 77%, 80%, 82%, 85%, 87%, 90%, 92%, 95%, 97%, 98%, 99% identical to SEQ ID NO: 14, a polypeptide sequence which is at least 60%, 62%, 65%, 67%, 70%, 72%, 75%, 77%, 80%, 82%, 85%, 87%, 90%, 92%, 95%, 97%, 98%, 99% identical to SEQ ID NO: 46, a polypeptide sequence which is at least 60%, 62%, 65%, 67%, 70%, 72%, 75%, 77%, 80%, 82%, 85%, 87%, 90%, 92%, 95%, 97%, 98%, 99% identical to SEQ ID NO: 44.

[0516] In some embodiments, the variable domain of the first heavy chain comprises CDR1, CDR2, and CDR3 of SEQ ID NO: 47; CDR1, CDR2, and CDR3 of SEQ ID NO: 111; CDR1, CDR2, and CDR3 of SEQ ID NO: 135; CDR1, CDR2, and CDR3 of SEQ ID NO: 187; or CDR1, CDR2, and CDR3 of SEQ ID NO: 211. In some embodiments, the variable domain of the first light chain comprises CDR1, CDR2, and CDR3 of SEQ ID NO: 48, CDR1, CDR2, and CDR3 of SEQ ID NO: 112; CDR1, CDR2, and CDR3 of SEQ ID NO: 136; CDR1, CDR2, and CDR3 of SEQ ID NO: 188; or CDR1, CDR2, and CDR3 of SEQ ID NO: 212. In some embodiments, the variable domain of the second heavy chain comprises CDR1, CDR2, and CDR3 of SEQ ID NO: 49, CDR1, CDR2, and CDR3 of SEQ ID NO: 113; CDR1, CDR2, and CDR3 of SEQ ID NO: 137; CDR1, CDR2, and CDR3 of SEQ ID NO: 189; or CDR1, CDR2, and CDR3 of SEQ ID NO: 213. In some embodiments, the variable domain of the second light chain comprises CDR1, CDR2, and CDR3 SEQ ID NO: 50, CDR1, CDR2, and CDR3 of SEQ ID NO: 114; CDR1, CDR2, and CDR3 of SEQ ID NO: 138; CDR1, CDR2, and CDR3 of SEQ ID NO: 190; or CDR1, CDR2, and CDR3 of SEQ ID NO: 214.

[0517] In some embodiments, the molecule comprises SEQ ID NO: 47, SEQ ID NO: 48, SEQ ID NO: 49, and SEQ ID NO: 50. In some embodiments, the molecule comprises SEQ ID NO:111, SEQ ID NO: 112, SEQ ID NO: 113, and SEQ ID NO: 114. In some embodiments, the molecule comprises SEQ ID NO: 135, SEQ ID NO: 135, SEQ ID NO: 137, and SEQ ID NO: 138. In some embodiments, the molecule comprises SEQ ID NO: 187, SEQ ID NO: 188, SEQ ID NO: 189, and SEQ ID NO: 190. In some embodiments, the molecule comprises SEQ ID NO: 211, SEQ ID NO: 212, SEQ ID NO: 213, and SEQ ID NO: 214.

[0518] In some embodiments, the molecule further comprises one or more disulfide bonds. In some embodiments, the molecule further comprises one or more linker sequences. In some embodiments, the molecule is capable of neutralizing a coronavirus. In some embodiments, the coronavirus is a SARS-CoV-2 virus. In some embodiments, the SARS-CoV-2 virus strain is selected from the group consisting of WA1, B.1.1.7, B1.526, B1.351, P1, B1.352, and B.1.427. In some embodiments, the molecule specifically recognizes a first epitope and a second epitope on a SARS-CoV-2 particle. In some embodiments, the first epitope comprises at least a portion of a receptor binding domain (RBD) on a spike protein of a SARS-CoV-2 particle. In some embodiments, the second epitope comprises at least a portion of a N-terminal domain (NTD) on a spike protein of a SARS-CoV-2 particle.

[0519] In certain aspects, the invention provides a method of treating or preventing a COVID-19 infection in a subject in need thereof, the method comprising administering to the subject a composition comprising a bispecific molecule comprising a first polypeptide chain and a second polypeptide chain, wherein: the first polypeptide chain comprises: a first light chain comprising a variable domain and a constant domain; a first heavy chain comprising a variable domain and a constant domain; the second polypeptide chain comprises: a second light chain comprising a variable domain and a constant domain; and a second heavy chain comprising a variable domain and a constant domain. In some embodiments, the first polypeptide chain and the second polypeptide chain are covalently bonded to one another.

[0520] In some embodiments, the first heavy chain comprises a polypeptide sequence which is at least 60%, 62%, 65%, 67%, 70%, 72%, 75%, 77%, 80%, 82%, 85%, 87%, 90%, 92%, 95%, 97%, 98%, 99% identical to SEQ ID NO: 47, a polypeptide sequence which is at least 60%, 62%, 65%, 67%, 70%, 72%, 75%, 77%, 80%, 82%, 85%, 87%, 90%, 92%, 95%, 97%, 98%, 99% identical to SEQ ID NO: 111, a polypeptide sequence which is at least 60%, 62%, 65%, 67%, 70%, 72%, 75%, 77%, 80%, 82%, 85%, 87%, 90%, 92%, 95%, 97%, 98%, 99% identical to SEQ ID NO: 135, a polypeptide sequence which is at least 60%, 62%, 65%, 67%, 70%, 72%, 75%, 77%, 80%, 82%, 85%, 87%, 90%, 92%, 95%, 97%, 98%, 99% identical to SEQ ID NO: 187, or a polypeptide sequence which is at least 60%, 62%, 65%, 67%, 70%, 72%, 75%, 77%, 80%, 82%, 85%, 87%, 90%, 92%, 95%, 97%, 98%, 99% identical to SEQ ID NO: 211.

[0521] In some embodiments, the first light chain comprises a polypeptide sequence which is at least 60%, 62%, 65%, 67%, 70%, 72%, 75%, 77%, 80%, 82%, 85%, 87%, 90%, 92%, 95%, 97%, 98%, 99% identical to SEQ ID NO: 48, a polypeptide sequence which is at least 60%, 62%, 65%, 67%, 70%, 72%, 75%, 77%, 80%, 82%, 85%, 87%, 90%, 92%, 95%, 97%, 98%, 99% identical to SEQ ID NO: 112, a polypeptide sequence which is at least 60%, 62%, 65%, 67%, 70%, 72%, 75%, 77%, 80%, 82%, 85%, 87%, 90%, 92%, 95%, 97%, 98%, 99% identical to SEQ ID NO: 136, a polypeptide sequence which is at least 60%, 62%, 65%, 67%, 70%, 72%, 75%, 77%, 80%, 82%, 85%, 87%, 90%, 92%, 95%, 97%, 98%, 99% identical to SEQ ID NO: 188, or a polypeptide sequence which is at least 60%, 62%, 65%, 67%, 70%, 72%, 75%, 77%, 80%, 82%, 85%, 87%, 90%, 92%, 95%, 97%, 98%, 99% identical to SEQ ID NO: 212.

[0522] In some embodiments, the second heavy chain comprises a polypeptide sequence which is at least 60%, 62%, 65%, 67%, 70%, 72%, 75%, 77%, 80%, 82%, 85%, 87%, 90%, 92%, 95%, 97%, 98%, 99% identical to SEQ ID NO: 49, a polypeptide sequence which is at least 60%, 62%, 65%, 67%, 70%, 72%, 75%, 77%, 80%, 82%, 85%, 87%, 90%, 92%, 95%, 97%, 98%, 99% identical to SEQ ID NO: 113, a polypeptide sequence which is at least 60%, 62%, 65%, 67%, 70%, 72%, 75%, 77%, 80%, 82%, 85%, 87%, 90%, 92%, 95%, 97%, 98%, 99% identical to SEQ ID NO: 137, a polypeptide sequence which is at least 60%, 62%, 65%, 67%, 70%, 72%, 75%, 77%, 80%, 82%, 85%, 87%, 90%, 92%, 95%, 97%, 98%, 99% identical to SEQ ID NO: 189, or a polypeptide sequence which is at least 60%, 62%, 65%, 67%, 70%, 72%, 75%, 77%, 80%, 82%, 85%, 87%, 90%, 92%, 95%, 97%, 98%, 99% identical to SEQ ID NO: 213.

[0523] In some embodiments, the second light chain comprises a polypeptide sequence which is at least 60%, 62%, 65%, 67%, 70%, 72%, 75%, 77%, 80%, 82%, 85%, 87%, 90%, 92%, 95%, 97%, 98%, 99% identical to SEQ ID NO: 50, a polypeptide sequence which is at least 60%, 62%, 65%, 67%, 70%, 72%, 75%, 77%, 80%, 82%, 85%, 87%, 90%, 92%, 95%, 97%, 98%, 99% identical to SEQ ID NO: 114, a polypeptide sequence which is at least 60%, 62%, 65%, 67%, 70%, 72%, 75%, 77%, 80%, 82%, 85%, 87%, 90%, 92%, 95%, 97%, 98%, 99% identical to SEQ ID NO: 138, a polypeptide sequence which is at least 60%, 62%, 65%, 67%, 70%, 72%, 75%, 77%, 80%, 82%, 85%, 87%, 90%, 92%, 95%, 97%, 98%, 99% identical to SEQ ID NO: 190, or a polypeptide sequence which is at least 60%, 62%, 65%, 67%, 70%, 72%, 75%, 77%, 80%, 82%, 85%, 87%, 90%, 92%, 95%, 97%, 98%, 99% identical to SEQ ID NO: 214.

[0524] In some embodiments, the variable domain of the first heavy chain comprises a polypeptide sequence which is at least 60%, 62%, 65%, 67%, 70%, 72%, 75%, 77%, 80%, 82%, 85%, 87%, 90%, 92%, 95%, 97%, 98%, 99% identical to SEQ ID NO: 35, a polypeptide sequence which is at least 60%, 62%, 65%, 67%, 70%, 72%, 75%, 77%, 80%, 82%, 85%, 87%, 90%, 92%, 95%, 97%, 98%, 99% identical to SEQ ID NO: 13. In some embodiments, the variable domain of the first light chain comprises a polypeptide sequence which is at least 60%, 62%, 65%, 67%, 70%, 72%, 75%, 77%, 80%, 82%, 85%, 87%, 90%, 92%, 95%, 97%, 98%, 99% identical to SEQ ID NO: 36, a polypeptide sequence which is at least 60%, 62%, 65%, 67%, 70%, 72%, 75%, 77%, 80%, 82%, 85%, 87%, 90%, 92%, 95%, 97%, 98%, 99% identical to SEQ ID NO: 14. In some embodiments, the variable domain of the second heavy chain comprises a polypeptide sequence which is at least 60%, 62%, 65%, 67%, 70%, 72%, 75%, 77%, 80%, 82%, 85%, 87%, 90%, 92%, 95%, 97%, 98%, 99% identical to SEQ ID NO: 13, a polypeptide sequence which is at least 60%, 62%, 65%, 67%, 70%, 72%, 75%, 77%, 80%, 82%, 85%, 87%, 90%, 92%, 95%, 97%, 98%, 99% identical to SEQ ID NO: 45, a polypeptide sequence which is at least 60%, 62%, 65%, 67%, 70%, 72%, 75%, 77%, 80%, 82%, 85%, 87%, 90%, 92%, 95%, 97%, 98%, 99% identical to SEQ ID NO: 43.

[0525] In some embodiments, the variable domain of the second light chain comprises a polypeptide sequence which is at least 60%, 62%, 65%, 67%, 70%, 72%, 75%, 77%, 80%, 82%, 85%, 87%, 90%, 92%, 95%, 97%, 98%, 99% identical to SEQ ID NO: 14, a polypeptide sequence which is at least 60%, 62%, 65%, 67%, 70%, 72%, 75%, 77%, 80%, 82%, 85%, 87%, 90%, 92%, 95%, 97%, 98%, 99% identical to SEQ ID NO: 46, a polypeptide sequence which is at least 60%, 62%, 65%, 67%, 70%, 72%, 75%, 77%, 80%, 82%, 85%, 87%, 90%, 92%, 95%, 97%, 98%, 99% identical to SEQ ID NO: 44.

[0526] In some embodiments, the variable domain of the first heavy chain comprises CDR1, CDR2, and CDR3 of SEQ ID NO: 47; CDR1, CDR2, and CDR3 of SEQ ID NO: 111; CDR1, CDR2, and CDR3 of SEQ ID NO: 135; CDR1, CDR2, and CDR3 of SEQ ID NO: 187; or CDR1, CDR2, and CDR3 of SEQ ID NO: 211. In some embodiments, the variable domain of the first light chain comprises CDR1, CDR2, and CDR3 of SEQ ID NO: 48, CDR1, CDR2, and CDR3 of SEQ ID NO: 112; CDR1, CDR2, and CDR3 of SEQ ID NO: 136; CDR1, CDR2, and CDR3 of SEQ ID NO: 188; or CDR1, CDR2, and CDR3 of SEQ ID NO: 212. In some embodiments, the variable domain of the second heavy chain comprises CDR1, CDR2, and CDR3 of SEQ ID NO: 49, CDR1, CDR2, and CDR3 of SEQ ID NO: 113; CDR1, CDR2, and CDR3 of SEQ ID NO: 137; CDR1, CDR2, and CDR3 of SEQ ID NO: 189; or CDR1, CDR2, and CDR3 of SEQ ID NO: 213. In some embodiments, the variable domain of the second light chain comprises CDR1, CDR2, and CDR3 SEQ ID NO: 50, CDR1, CDR2, and CDR3 of SEQ ID NO: 114; CDR1, CDR2, and CDR3 of SEQ ID NO: 138; CDR1, CDR2, and CDR3 of SEQ ID NO: 190; or CDR1, CDR2, and CDR3 of SEQ ID NO: 214. In some embodiments, the molecule comprises SEQ ID NO: 47, SEQ ID NO: 48, SEQ ID NO: 49, and SEQ ID NO: 50. In some embodiments, the molecule comprises SEQ ID NO:111, SEQ ID NO: 112, SEQ ID NO: 113, and SEQ ID NO: 114. In some embodiments, the molecule comprises SEQ ID NO: 135, SEQ ID NO: 135, SEQ ID NO: 137, and SEQ ID NO: 138. In some embodiments, the molecule comprises SEQ ID NO: 187, SEQ ID NO: 188, SEQ ID NO: 189, and SEQ ID NO: 190. In some embodiments, the molecule comprises SEQ ID NO: 211, SEQ ID NO: 212, SEQ ID NO: 213, and SEQ ID NO: 214.

[0527] In some embodiments, the molecule further comprises one or more disulfide bonds. In some embodiments, the molecule further comprises one or more linker sequences. In some embodiments, the molecule is capable of neutralizing a coronavirus. In some embodiments, the coronavirus is a SARS-CoV-2 virus. In some embodiments, the SARS-CoV-2 virus strain is selected from the group consisting of WA1, B.1.1.7, B1.526, B1.351, P1, B1.352, and B.1.427.

[0528] In some embodiments, the molecule specifically recognizes a first epitope and a second epitope on a SARS-CoV-2 particle. In some embodiments, the first epitope comprises at least a portion of a receptor binding domain (RBD) on a spike protein of a SARS-CoV-2 particle. In some embodiments, the second epitope comprises at least a portion of a N-terminal domain (NTD) on a spike protein of a SARS-CoV-2 particle. In some embodiments, the composition is administered in combination with a second therapeutic agent.

[0529] Antibody Structure

[0530] Antibodies are glycoproteins with an immunoglobulin (Ig) monomeric functional domain. Secreted antibodies can have multiple Ig units. The Ig monomer is a “Y”-shaped molecule with four polypeptide chains: two identical heavy chains and two identical light chains. The chains can be connected by disulfide bonds.

[0531] There are five types of mammalian Ig heavy chains referred to as: α, δ, ε, γ, and μ, defining the class of antibody. Distinct heavy chains differ in their size and composition. Each heavy chain comprises of two regions—the constant region and the variable region. The constant region is identical in all antibodies of the same isotype, but differs in antibodies of different isotypes. The variable region of the heavy chain differs in antibodies produced by different B cells, but is the same for all antibodies produced by a single B cell or a B cell clone. The variable region of each heavy chain is approximately 110 amino acids long.

[0532] There are two types of light chains in mammals—lambda (λ) and kappa (κ). A light chain comprises of two domains, the constant domain and the variable domain. The approximate length of the light chain is 211 to 217 amino acids. Each antibody contains two identical light chains.

[0533] The two arms of the Y-shaped antibody molecule include the antibody binding sites, which that can bind two antigens. The two antigens can be identical or they can be different for example in bispecific antibodies. This region of the antibody is called the Fab (fragment, antigen binding) region and it confers the antibody with its specificity. Thus, the Fab includes one constant and one variable domain from each heavy and each light chain of the antibody. The variable domain, also called the Fv region, is the most important region for recognizing and binding to antigens such as viral proteins or receptors on the surface of host cells. There are three variable loops light chain (VL) and three variable loops on the heavy (VH) chain of the antibody, which are responsible for binding to the antigen. The loops are called the complementarity determining regions (CDRs).

[0534] The base of the Y-shaped molecule is called the Fc (Fragment, crystallizable) region and it is important for modulating immune cell activity. The Fc includes two heavy chains and it can bind to specific to ensure that each antibody generates an appropriate immune response for a particular antigen. It can also mediate different physiological effects including opsonization, cell lysis, and degranulation of mast cells, basophils and eosinophils. Additionally, the two N-terminal fragments of the antibody are called the Fab region, and the C-terminal fragment is called the Fc region.

[0535] In one embodiment, the subject matter described herein relates to monoclonal and bispecific antibodies, variants, fusion proteins comprising an antibody portion with an antigen recognition site of the required specificity. In some embodiments, antigen-binding fragment of an antibody is a portion of an antibody that possesses an at least one antigen recognition site. Fragments include for example but not limited to Fab, Fab′, F(ab′)2 Fv), and single chain (scFv).

[0536] The antibodies can be produced recombinantly by any means known in the art. In one embodiment, such an antibody is sequenced and the polynucleotide sequence is then cloned into a vector for expression or propagation. In one embodiment, the antibody is synthesized. The sequence encoding the antibody of interest may be maintained in a vector in a host cell and the

host cell can then be expanded and frozen for future use. The polynucleotide sequence of such antibodies may be used for genetic manipulation to generate the bispecific molecules described herein.

[0537] Antibody Therapy

[0538] Antibody therapy uses monoclonal or bispecific antibodies to bind to pre-determined antigens. This therapy can stimulate the patient's immune system to attack those antigens such as viruses. In the clinical setting, the most common route of administration of therapeutic antibodies is the intravenous (IV) infusion. The can be followed by subcutaneous administration, although an intramuscular injection is also possible. Oral administration routes of antibodies are also being developed. The monoclonal and bispecific antibodies described herein can be administered to a subject through any useful method known in the art. The monoclonal and bispecific antibodies described herein can be administered daily. The monoclonal and bispecific antibodies described herein can be administered twice, three times, four times, five times, or several times a day. The monoclonal and bispecific antibodies described herein can be administered for 1, 2, 3, 4, 5, 6 days or for 1 or 2 weeks. In some embodiments, the monoclonal and bispecific antibodies described herein can be administered for a period longer than two weeks. The monoclonal and bispecific antibodies described herein can be administered in combination with any other therapeutically effective agent or a combination of agents.

[0539] COVID-19 Therapeutics—mAbs

[0540] The only treatment currently approved for the treatment of patients with COVID-19 is remdesivir. Remdesivir shows some benefit in shortening the time for recovery from severe COVID-19. There is currently an effort in the field to identify biologics or small molecules that have more potent and broad effects against the spread of the SARS-CoV-2 virus. FIG. 1A shows a SARS-CoV-2 viral particle schematic diagram. FIG. 1B shows the spike protein trimer, the protein that located on the surface of the virus and binds to a cell receptor on the target cells. The RBD is a critical component of the viral spike glycoprotein that is found on coronaviruses including SARS-CoV-2 and plays the most important role in viral attachment, fusion and entry into the host cell. The receptor binding domain (RBD) is shown in green on top. The spike protein also has an N-terminal domain (NTD). RBD and NTD are targeted by antibodies against SARS-CoV-2 and variant strains. The spike protein trimer can be used to isolate B-cells from convalescent patient samples. FIG. 1C shows an electronic micrograph of coronavirus particles. The arrow denotes the viral spike protein on the viral membrane.

[0541] In some embodiments, the subject matter described herein relates to the isolation, characterization and providing the sequences of potent monoclonal antibodies (mAbs) against the SARS-CoV-2 virus, which causes COVID-19. In some embodiments, the subject matter disclosed herein describes the optimal COVID-19 patients from which to isolate potent mAbs against SARS-CoV-2. The mAbs can be isolated from blood samples from patients diagnosed with COVID-19 or patients exhibiting COVID-19 related symptoms. Once the antibody sequences are determined from these samples, the mAbs can be synthesized in vitro. In some embodiments, the mAb sequences can be modified and optimized prior to synthesis. These mAb can be used for subsequent characterization experiments. In some embodiment, the subject matter disclosed herein relates to the identification of mAbs significantly more potent, with than any other SARS-CoV-2 mAb known in the art to date. In some embodiments, the mAb lower IC50 and/or IC90 values,

[0542] The SARS-CoV-2 neutralizing mAbs described herein can be used for treatment of subjects infected with SARS-CoV-2. In some embodiments, the mAbs described herein reduce SARS-CoV-2 viral load in a subject in need thereof. In some embodiment, the mAbs described herein decrease disease severity in a subject in need thereof. In some embodiments, the mAbs described herein improve clinical outcome of COVID-19 in subjects in need thereof.

[0543] In some embodiments, the mAbs described herein can be used as prophylaxis to prevent high risk subjects and individuals from becoming infected with SARS-CoV-2. In some embodiment, the high risk subject can be healthcare workers in close proximity to COVID-19 patients or the family members of these healthcare workers. In some embodiment, the mAbs described herein can be used as prophylaxis for the general population at large.

[0544] Flow Through of Identification Process for the Potent COVID-19 mAbs

[0545] In one embodiment, the subject matter disclosed herein related to identification, isolation from patients, and characterization of potent mAbs against SARS-CoV-2, its variants, or any coronavirus. One embodiment of the method described herein for isolation of such antibodies is described below. In one embodiment, the subject matter disclosed herein related to administration of the antibodies described herein to subjects in need thereof to treat or prevent disease. In some embodiments, the treatment includes administration of one type of monoclonal antibody. In some embodiments, the treatment includes administration of a cocktail of two or more monoclonal antibodies.

[0546] Plasma samples from COVID-19 patients can be isolated and evaluated for the ability of potential antibodies contained within these plasma samples to: A) bind the viral envelope of SARS-CoV-2 or a variant strain (analysis can be by ELISA); and B) neutralize SARS-CoV-2 or a variant strain in vitro. Plasma samples from COVID-19 patients with severe disease or symptomology can have stronger antiviral activities than plasma samples from COVID-19 patients with non-severe disease. Plasma sample which are determined to have the strongest activity can be used to select patients for further analysis of monoclonal antibodies.

[0547] Peripheral blood mononuclear cells (PMBCs) can be isolated from COVID-19 patients whose plasma samples exhibit the strongest activity in order to isolate single B cells. These B-cells contain mAb-sequences that can be responsible for the strong plasma antiviral activity identified above. The antibody sequences can be recovered from these single B cells by any high throughput sequencing methods known in the art. The genes from the single B cells encoding for these mAb sequences can be synthesized and cloned into expression vectors. The encoded monoclonal antibodies can then be expressed in vitro and purified for subsequent analyses and characterization.

[0548] In vitro-produced and purified monoclonal antibodies can then tested for their ability to: A) bind to the virus envelope of SARS-CoV-2 or a variant strain (analysis can be by ELISA); and B) neutralize SARS-CoV-2 or a variant strain, thus stopping or preventing infections caused by coronaviruses. Neutralization analysis can be performed by both pseudotyped virus assay and/or live virus neutralization assays. Those mAbs that perform the best can then subjected to additional characterization studies including but not limited to ELISA competition assays, surface plasmon resonance (SPR) binding affinity analyses and size exclusion chromatography. Antibody performance can be indicated by potency, IC50 concentration, and IC90 concentration. An IC50 is a quantitative measure used to indicated the concentration of an antibody needed to inhibit a virus or a virus population by 50%. An IC90 is a quantitative measure used to indicated the concentration of an antibody needed to inhibit a virus or a virus population by 90%. These are measures of the potency of the antibody.

[0549] In one embodiment of the subject matter described herein, more than 100 million cells have been screened by the described method from 8 patients, 276 mAb sequences were synthesized, 66 mAbs were tested and characterized. In one embodiment, 6 mAbs have emerged as top hits with good antiviral activity against SARS-CoV-2. In one embodiment, 1 mAb has emerged with exceptional antiviral activity and potency against SARS-CoV-2. In one embodiment, the subject matter described herein relates to monoclonal antibodies with significantly higher potency than any other SARS-CoV-2 mAb known in the art to date. In one embodiment, the subject matter described herein relates to monoclonal antibodies with significantly lower IC50 and IC90 concentration values than any other mAb known in the art to date against SARS-CoV-2 or a variant strain.

[0550] In one embodiment, additional monoclonal antibodies are identified from the samples in the screening pipeline and if additional plasma samples from COVID-19 patient are screened for their ability to neutralize SARS-CoV-2.

[0551] The mAbs generated through the process described herein are significantly more potent than other antibodies known in the art against SARS-CoV-2 or a variant strain. In some embodiment, the subject matter described herein relates to mAbs against SARS-CoV-2 with high antiviral activity in subjects. In some embodiments the high antiviral activity is higher than the activity of SARS-CoV-2 known in the art. In some embodiments, the subjects are humans. In some embodiments, the subjects are human patients.

[0552] In some embodiments, more potent antibodies require smaller amounts (lower concentrations) to be administered to the subject in need thereof to achieve the desired COVID-19-related clinical effects. This can be achieved through administration of lower dosages to subjects. Therefore fewer potential side effects will be observed with less frequent dosing regimens or smaller amount of antibodies. This potentially will lower the antibody production costs. In some embodiments, the mAb against SARS-CoV-2 lead to faster recovery of subjects with COVID-19 and greater efficacy overall.

[0553] In some embodiments, the mAb described herein target multiple epitopes on the SARS-CoV-2 virus or a variant strain. In some embodiments, the subject matter disclosed herein relates to an antibody combination cocktails to be administered to the subject. In some embodiments, the antibodies in the cocktails target multiple epitopes on the SARS-CoV-2 virus or a variant strain. In some embodiments, the antibody combination cocktails provide even greater efficacy and lower the possibility of viral resistance than each individual antibody of the cocktail.

[0554] In some embodiments, the mAb described herein can be used for treatment and/or prevention of COVID-19 infection. In some embodiments, the mAbs described herein can be administered to the subject as a prevention or prophylaxis. In some embodiments, the mAbs can be used for diagnosis of COVID-19 subject exposure. In some embodiment, the mAbs described herein can be utilized in laboratory research and development activities.

[0555] Sequences of the mAbs described herein against SARS-CoV-2 or a variant strain

[0556] Underlined and italicized amino acids represent the respective complementarity-determining regions (CDRs). There are three CDRs per sequence, appearing on the sequence in the order CDR1, CDR2, and CDR3.

[0557] In one embodiment, the monoclonal antibody 2-4 comprises SEQ ID NOs: 1 and 2.

[0558] SEQ ID NO: 1 is the variable region of the heavy chain of antibody number 2-4.

QVQLVQSGAEVKKPGASVKVSCKASGYTFTGYYMHWVRQAPGQGLEWMGW
INPNSGGTNYTQMFQGRVTMTRDTSISTAYMEVSRLRSDDTAVYYCARDR
SWAVVYYYMDVWGKGTTVTVSS

[0559] SEQ ID NO: 2 is the variable region of the light chain of antibody number 2-4.

QSALTQPPSASGSPGQSVTISCTGTSSDVGGYNYVSWYQQHPGKAPKLMI
YEVSKRPSGVPDRFSGSKSGNTASLTVSGLQAEDEADYYCSSYAGSNNLV
FGGGTKLTVL

[0560] In one embodiment, the monoclonal antibody 4-8 comprises SEQ ID NOs: 3 and 4.

[0561] SEQ ID NO: 3 is the variable region of the heavy chain of antibody number 4-8.

QVQLVQSGAEVKKAGSSVKVSCKASGGTFSSHTITWVRQAPGQGLEWMGR
IIPILGIANYAQKFQGRVTITADKSTSTAYMELSSLRSEDTAVYYCASLQ
TVDTAIEKYYGMDVWGQGTTVTVSS

[0562] SEQ ID NO: 4 is the variable region of the light chain of antibody number 4-8

SYELTQPPSVSVSPGQTASITCSGDKLGDKYACWYQQKPGQSPVLVIYQD
NKRPSGIPERFSGSNSGNTATLTISGTQAMDEADYYCQAWDSSTAVFGGG
TKLTVL

[0563] In one embodiment, the monoclonal antibody 2-15 comprises SEQ ID NOs: 5 and 6.

[0564] SEQ ID NO: 5 is the variable region of the heavy chain of antibody number 2-15.

QVQLVQSGAEVKKPGASVRVSCKASGYTFTGYYMHWVRQAPGQGLEWMGW
INPISDGTNYAQKFQGWVTMTRDTSISTVYMELSRLRSDDTAVYYCARGG
SRCSGGNCYGWAYDAFDIWGQGTMITVSS

[0565] SEQ ID NO: 6 is the variable region of the light chain of antibody number 2-15.

QSALTQPASVSGSPGQSITISCTGTSSDVGGYNFVSWYQQHPGKAPKLMI
YDVSKRPSGVSNRFSGSKSGNTASLTISGLQAEDEADCYCSSYTSSSTFV
FGTGTKVTVL

[0566] In one embodiment, the monoclonal antibody 2-38 comprises SEQ ID NOs: 7 and 8.

[0567] SEQ ID NO: 7 is the variable region of the heavy chain of antibody number 2-38.

EVQLVESGGGLVKPGGSLRLSCAASGFTFSSYSMNWVRQAPGKGLEWVSS
ISSSSSYIYYADSVKGRFTISRDNAKNSLYLQMNSLRAEDTAVYYCTRAG
WELRLDAFDIWGQGTMVTVSS

[0568] SEQ ID NO: 8 is the variable region of the light chain of antibody number 2-38.

SSELTQDPAVSVALGQTVRITCQGDSLRSSYASWYQQKPGQAPILVIYDK
NNRPSGIPDRFSGSSSGNTASLTITGAQAEDEADYYCNSRDSSGILFGGG
TKLTVL

[0569] In one embodiment, the monoclonal antibody 2-51 comprises SEQ ID NOs: 9 and 10.

[0570] SEQ ID NO: 9 is the variable region of the heavy chain of antibody number 2-51.

QVQLVQSGAEVKKPGASVKVSCKVSGYTLIELSMHWVRQAPGKGLEWMGG
FDPEDVETIYAQQFQGRVTMTEDTSTDTAYMELSSLRSEDTAVYYCATGW
AYKSTWYFGYWGQGTLVTVSS

[0571] SEQ ID NO: 10 is the variable region of the light chain of antibody number 2-51.

QSALTQPPSASGSPGQSVTISCTGTSSDVGGYNYVSWYQQHPGKAPKLMI
YEVSKRPSGVPDRFSGSKSGNTASLTVSGLQAEDEADYYCSSYAGSRMGF
GGGTKLTVL

[0572] In one embodiment, the monoclonal antibody 4-32 comprises SEQ ID NOs: 11 and 12.

[0573] SEQ ID NO: 11 is the variable region of the heavy chain of antibody number 4-32.

EVQLVESGGGLVQPGRSLRLSCAASGFSFDDYAMHWVRQAPGKGLEWVSG
ISWNSGSIGYADSVKGRFTISRDNAKNSLYLQMNSLRAEDTALYYCAKGL
VQDYDSSGYFFADRVSAFDIWGQGTMVTVSS

[0574] SEQ ID NO: 12 is the variable region of the light chain of antibody number 4-32.

DIQMTQSPSSLSASVGDRVTITCRASQSINSYLNWYQQKPGKAPKLLIYA
ASSLQSGVPSRFSGSGSGTDFTLTISSLQPEDFATYYCQQSYSTPLTFGG
GTKVEIK

[0575] In one embodiment, the monoclonal antibody 2-7 comprises SEQ ID NOs: 13 and 14.

[0576] SEQ ID NO: 13 is the variable region of the heavy chain of antibody number 2-7, which specifically recognizes the receptor binding domain (RBD).

SQITLKESGPTLVKPTQTLTLTCTFSGFSLSTSGVGVGWIRQPPGKALEW
LALIYWDDDKRYSPSLKSRLTITKDTSKNQVVLTMTNMDPVDTATYYCAH
HKIERIFDYWGQGTLVTVSSAS

[0577] SEQ ID NO: 14 is the variable region of the light chain of antibody number 2-7, which specifically recognizes the RBD.

QSALAQPASVSGSPGQSITISCTGTSSDVGAYNYVSWYQQHPGKAPKLMI
YDVSKRPSGVSNRFSGSKSGNTASLTISGLQAEDEADYYCSSYTTSSTVF
GGGTKLTVL

[0578] In one embodiment, the monoclonal antibody 1-57 comprises SEQ ID NOs: 15 and 16.

[0579] SEQ ID NO: 15 is the variable region of the heavy chain of antibody number 1-57, which specifically recognizes the RBD.

EVHLVESGGGLVQPGGSLRLSCAASGFTFSDHYMDWVRQAPGKGLEWVGR
TRNKANSYTTEYAASVKGRFTISRDDAKNSLYLQMNSLKTEDTAVYYCAR
VHRWAYCINGVCFGAYSDYWGQGTLNYNSS

[0580] SEQ ID NO: 16 is the variable region of the light chain of antibody number 1-57, which specifically recognizes the RBD.

EIVLTQSPGTLSLSPGERATLSCRASQSVSSSYLAWYQQKPGQAPRLLIY
GASSRATGIPDRFSGSGSGTDFTLTISRLEPEDFAVYYCQQYGSSPSTFG
QGTKLEIK

[0581] In one embodiment, the monoclonal antibody 1-20 comprises SEQ ID NOs: 17 and 18.

[0582] SEQ ID NO: 17 is the variable region of the heavy chain of antibody number 1-20, which specifically recognizes the RBD.

EVQLVESGGGLIQPGGSLRLSCAASGLTVSSNYMSWVRQAPGKGLEWVSV
IYSGGSTFYADSVKGRFTISRDNSKNTLYLQMNSLRAEDTAVYYCARDLF
YYGMDVWGQGTTVTVSS

[0583] SEQ ID NO: 18 is the variable region of the light chain of antibody number 1-20, which specifically recognizes the RBD.

DIQLTQSPSFLSASVGDRVTITCRASQGISSYLAWYQQKPGKAPKLLIYA
ASTLQSGVPSRFSGSGSGTEFTLTISSLQPEDFATYYCQQLNSYPCFGPG
TKVDIK

[0584] In one embodiment, the monoclonal antibody 2-30 comprises SEQ ID NOs: 19 and 20.

[0585] SEQ ID NO: 19 is the variable region of the heavy chain of antibody number 2-30, which specifically recognizes the RBD.

QVQLVESGGGVVQPGRSLRLSCAASGFTFSSYTMHWVRQAPGKGLEWVAA
ISYDGNNKYYADSVKGRFTISRDNSKNTLYLQMNSLRAEDTAVYYCARSI
LYGGGMDVWGQGTTVTVSS

[0586] SEQ ID NO: 20 is the variable region of the light chain of antibody number 2-30, which specifically recognizes the RBD.

DIQLTQSPSSLSASVGDRVTITCRASQGISSYLAWYQQKPGQAPKLLIYA
ASTLQSGVPSRFSGSGSGTDFTLTISSLQPEDFATYYCQQLNSYPLTFGG
GTKVEIK

[0587] In one embodiment, the monoclonal antibody 4-20 comprises SEQ ID NOs: 21 and 22.

[0588] SEQ ID NO: 21 is the variable region of the heavy chain of antibody number 4-20, which specifically recognizes the RBD.

QVQLLQSGAEVKKPGASVKVSCKASGYSFTSYYMHWVRQAPGQGLEWMGI
INPSGGGTTYAQKFQGRVTMTRDTSTSTVYMELSSLRSEDTAVYYCARPG
GGSYQEFDYWGQGTLVTVSS

[0589] SEQ ID NO: 22 is the variable region of the light chain of antibody number 4-20, which specifically recognizes the RBD.

DIQMTQSPSSLSASVGDRVTITCRASQSISSYLNWYQQKPGKAPKLLISA
ASSLQSGVPSRFSGSGSGTDFTLTISSLQPEDFATYYCQQSYNTLQVTFG
GGTKVEIK

[0590] In one embodiment, the monoclonal antibody 4-18 comprises SEQ ID NOs: 23 and 24.

[0591] SEQ ID NO: 23 is the variable region of the heavy chain of antibody number 4-18, which specifically recognizes the N-Terminal domain (NTD).

QVQLVESGGGVVQPGRSLRLSCAASGFTFSSYGMHWVRQAPGKGLEWVA
VISYDGSNKHYADSVKGRFTISRDNSKNTLYLQMNSLRAEDTAVYYCAK
DSGYNYGYSWFDPWGQGTLVTVSS

[0592] SEQ ID NO: 24 is the variable region of the light chain of antibody number 4-18, which specifically recognizes the NTD.

SYELTQPPSVSVSPGQTARITCSADALAKQYAYWYQQKPGQAPVLVIYK
DSERPSGIPERFSGSSSGTTVTLTISGVQAEDEADYYCQSTDNSGTYPN
WVFGGGTKLTVL

[0593] In one embodiment, the monoclonal antibody 5-24 comprises SEQ ID NOs: 25 and 26.

[0594] SEQ ID NO: 25 is the variable region of the heavy chain of antibody number 5-24, which specifically recognizes the NTD.

QVQLVESGGGVVQPGRSLRLSCAASGLTFSSYVMHWVRQAPGKGLDWVG
VIWYDGSKKYYADSVKGRFTISRDNSKNTLYLQMNSLRAEDTAVYYCAR
DPRDYYDFWSGYDYYYGLDVWGQGTTVTVSS

[0595] SEQ ID NO: 26 is the variable region of the light chain of antibody number 5-24, which specifically recognizes the NTD.

EIVLTQSPGILSLSPGERATLSCRASQSVSSSYLAWYQQKPGQAPRLLI
YGASSRATGIPDRFSGSGSGTDFTLTISRLEPEDFAVYYCQQYGSSGAL
TFGGGTKVEIK

[0596] In one embodiment, the monoclonal antibody 5-7 comprises SEQ ID NOs: 27 and 28.

[0597] SEQ ID NO: 27 is the variable region of the heavy chain of antibody number 5-7, which specifically recognizes the NTD.

QVQLVQSGAEVKKPGASVKVSCKASGYTFTSYYMHWVRQAPGQGLEWMG
VINPSGGSTSYAEKFRGRVTMTRDTSTSTVYMELSSLRSEDTAVYYCAR
DREPHSDSSGYWDSLKYYYYYALDVWGQGTTVTVSS

[0598] SEQ ID NO: 28 is the variable region of the light chain of antibody number 5-7, which specifically recognizes the NTD.

AIQLTQSPSSLSASVGDRVTITCRASQGISSYLAWYQQKPGKAPELLIY
AASTLQSGVPSRFSGSGSGTDFTLTISSLQPEDFATYYCQQLNTYPFTF
GPGTKVDIK

[0599] In one embodiment, the monoclonal antibody 1-68 comprises SEQ ID NOs: 29 and 30.

[0600] SEQ ID NO: 29 is the variable region of the heavy chain of antibody number 1-68, which specifically recognize the NTD.

QVQLVQSGAEVKKPGASVKVSCKVSGYTLIELSMHWVRQAPGKGLEWMGG
FDPEDAETTYAQKFQGRVTMTEDTSTDTAYMELSSLRSEDTAVYYCATGW
AVAGSSDVWYYYYGMDVWGQGTTVTVSS

[0601] SEQ ID NO: 30 is the variable region of the light chain of antibody number 1-68, which specifically recognizes the NTD.

QSALTQPPSVSGSPGQSVTISCTGTSSDVGSYNRVSWYQQPPGTAPKLMI
YEVSNRPSGVPDRFSGSKSGNTASLTISGLQAEDEADYYCSSYTSSSTYV
FGTGTKVTVL

[0602] In one embodiment, the monoclonal antibody 2-43 comprises SEQ ID NOs: 31 and 32.

[0603] SEQ ID NO: 31 is the variable region of the heavy chain of antibody number 2-43, which recognizes an epitope other than the RBD or the NTD.

QVQLVQSGAEVKKPGASVKVSCKASGYTFTGYYMHWVRQAPGQGLEWM
GWINPNSGGTNYAQKFQGRVTMTRDTSITTAYMELRRLRSDDTAVYYC
ARGLGVGCSGGNCYLDYYYMDVWGKGTTVTVSS

[0604] SEQ ID NO: 32 is the variable region of the light chain of antibody number 2-43, which recognizes an epitope other than the RBD or the NTD.

QSALTQPASVSGSPGQSITISCTGTSSDVGGYNYVSWYQQHPGKAPKLMI
YDVSKRPSGVSNRFSGSKSGNTASLTISGLQAEDEGDYYCSSYTSSSTWV
FGGGTKLTVL

[0605] In one embodiment, the monoclonal antibody 4-19 comprises SEQ ID NOs: 33 and 34.

[0606] SEQ ID NO: 33 is the variable region of the heavy chain of antibody number 4-19, which recognizes an epitope other than the RBD or the NTD.

QVQLQESGPGLVKPSETLSLTCTVSGGSISNYYWSWIRQSPGKGLEWIGY
IYYSGSTNYNPSLKSRVTISVDTSKNQFSLKLSSVTAADTAVYYCARSAK
HWLAPPGDYYYYMDVWGKGTTVTVSS

[0607] SEQ ID NO: 34 is the variable region of the light chain of antibody number 4-19, which recognizes an epitope other than the RBD or the NTD.

DIQLTQSPSFLSASVGDRVTITCRASQGISSYLAWYQQKPGKAPKLLIY
AASTLQSGVPSRFSGSGSGTEFTLTISSLQPEDFATYYCQQLNSYLTFG
GGTKVEIK

[0608] In one embodiment, the monoclonal antibody 2-17 comprises SEQ ID NOs: 35 and 36.

[0609] SEQ ID NO: 35 is the variable region of the heavy chain of antibody number 2-17, which recognizes an epitope other than the RBD or the NTD.

QVQLVQSGAEVKKPGSSVKVSCKASGGTFSSYAISWVRQAPGQGLEWMG
GNIPIFGTANYAQKFQGRVTITADESTSTAYMELSSLRSEDTAVYYCAR
GVGYRGVIPLNWFDPWGQGTVVTVSS

[0610] SEQ ID NO: 36 is the variable region of the light chain of antibody number 2-17, which recognizes an epitope other than the RBD or the NTD.

EIVMTQSPATLSVSPGERATLSCRASQSVSSDLAWYQHKPGQAPRLLIY
GASTRATGIPVRFSGSGSGTEFTLTISSLQSEDFAVYYCQQYNNWPPFT
FGGGTKVEIK

RBD binders

[0611] In one embodiment, the monoclonal antibody 2-36 comprises SEQ ID NOs: 37 and 38.

[0612] SEQ ID NO: 37 is the variable region of the heavy chain of antibody number 2-36, which specifically recognizes the RBD.

QVQLQESGPGLVKPSETLSLTCTVSGGSVSSSNYYWSWIRQPPGKGLEW
IGYMYYSGSTKYNPSLKSRVTISVDTSKNQFSLKLSSVTAADTAVYYCA
REVYYYDRSGYYASDGFDIWGQGTMVTVSS

[0613] SEQ ID NO: 38 is the variable region of the light chain of antibody number 2-36, which specifically recognizes the RBD.

EIVLTQSPGTLSLSPGERATLSCRASQSVSSSYLAWYQQKPGQAPRLLIY
GASSRATGIPDRFSGSGSGTDFTLTISRLEPEDFAVYYCQQYGSSPQTFG
QGTKVEIK

[0614] In one embodiment, the monoclonal antibody 1-87 comprises SEQ ID NOs: 39 and 40.

[0615] SEQ ID NO: 39 is the variable region of the heavy chain of antibody number 1-87, which specifically recognizes the NTD.

QVQLVQSGAEVKKPGASVKVSCKVSGYTLIELSMHWVRQAPGKGLEWMGG
FDPEDAETIYAQKFQGRVTMTEDTSTDTAYMELSSLRSEDTAVYYCATGI
AVIGPPPSTYYYYGMDVWGQGTTVTVSS

[0616] SEQ ID NO: 40 is the variable region of the light chain of antibody number 1-87, which specifically recognizes the NTD.

QSALTQPASVSGSPGQSITISCTGTSSDVGGYNYVSWYQQHPGKAPKLMI
YDVSKRPSGVSNRFSGSKSGNTASLTISGLQAEDEADYYCSSYTSSSTYV
FGTGTKVTVL

[0617] In one embodiment, the monoclonal antibody 2-15 mut comprises SEQ ID NOs: 41 and 42.

[0618] SEQ ID NO: 41 is the variable region of the heavy chain of the 2-15 mut mAb.

QVQLVQSGAEVKKPGASVRVSCKASGYTFTGYYMHWVRQAPGQGLEWMGW
INPISDGTNYAQKFQGWVTMTRDTSISTVYMELSRLRSDDTAVYYCARGG
SRCSGGNCYGWAYDAFDIWGQGTMITVSS

[0619] SEQ ID NO: 42 is the variable region of the light chain of the 2-15 mut mAb.

QSALTQPASVSGSPGQSITISCTGTSSDVGGYNFVSWYQQHPGKAPKLMI
YDVSKRPSGVSNRFSGSKSGNTASLTISGLQAEDEADSYCSSYTSSSTFV
FGTGTKVTVL

[0620] In one embodiment, the monoclonal antibody 4-8(39/51) comprises SEQ ID NOs: 43 and 44.

[0621] SEQ ID NO: 43 is the variable region of the heavy chain of the 4-8(39/51) mAb.

QVQLVQSGAEVKKAGSSVKVSCKASGGTFSSHTITWVRLAPGQGLEWMGR
NIPILGIANYAQKFQGRVTITADKSTSTAYMELSSLRSEDTAVYYCASLQ
TVDTAIEKYYGMDVWGQGTTVTVSS

[0622] SEQ ID NO: 44 is the variable region of the light chain of the 4-8(39/51) mAb.

SYELTQPPSVSVSPGQTASITCSGDKLGDKYACWYQQKPGQSPVLVIYQD
NKRPSGIPERFSGSNSGNTATLTISGTQAMDEADYYCQAWDSSTAVFGGG
TKLTVL

[0623] In one embodiment, the monoclonal antibody 4-8(39/51/57) comprises SEQ ID NOs: 45 and 46.

[0624] SEQ ID NO: 45 is the variable region of the heavy chain of the 4-8(39/51/57) mAb.

QVQLVQSGAEVKKAGSSVKVSCKASGGTFSSHTITWVRLAPGQGLEWMGR
NIPILGTANYAQKFQGRVTITADKSTSTAYMELSSLRSEDTAVYYCASLQ
TVDTAIEKYYGMDVWGQGTTVTVSS

[0625] SEQ ID NO: 46 is the variable region of the light chain of the 4-8(39/51/57) mAb.

SYELTQPPSVSVSPGQTASITCSGDKLGDKYACWYQQKPGQSPVLVIYQD
NKRPSGIPERFSGSNSGNTATLTISGTQAMDEADYYCQAWDSSTAVFGGG
TKLTVL

[0626] Nucleic acid sequences of the monoclonal antibodies described herein against SARS-CoV-2 or variant strains

[0627] In some embodiments, the subject matter disclosed herein relates to DNA sequences that encode any of the monoclonal antibodies disclosed herein. In some embodiments, the subject matter disclosed herein relates to mRNA sequences that encode any of the antibodies disclosed herein. As used herein, the terms “nucleic acid” and “nucleotide sequence” refer to both DNA and RNA molecules, including base-modified, sugar-modified or backbone-modified DNA or RNA molecules.

[0628] In some embodiments, the subject matter disclosed herein relates to an isolated nucleic acid having a nucleotide sequence encoding any of the antibodies of the present disclosure. In some embodiments, the nucleotide sequences encoding any of the antibodies of the present disclosure are codon-optimized for efficient expression in a host system. In some embodiments, the nucleotide sequences encoding any of the antibodies of the present disclosure are codon-optimized to increase the translational efficiency of the nucleotide sequences. In some embodiments, the nucleotide sequences encoding any of the antibodies of the present disclosure are codon-optimized to accommodate the codon bias of the host system. In some embodiments, the nucleotide sequences encoding any of the antibodies of the present disclosure are codon-optimized to remove redundancy and/or evolutionary constraints, including, but not limited to, the availability of tRNA isoacceptors, TATA box, Shine-Dalgarno sequences.

[0629] In some embodiments, the subject matter disclosed herein relates to a codon-optimized, isolated nucleic acid comprising a nucleic acid sequence encoding a monoclonal antibody including SEQ ID NO: 1. In some embodiments, the subject matter disclosed herein relates to a codon-optimized, isolated nucleic acid comprising a nucleic acid sequence encoding a monoclonal antibody including SEQ ID NO: 2. In some embodiments, the subject matter disclosed herein relates to a codon-optimized, isolated nucleic acid comprising a nucleic acid sequence encoding a monoclonal antibody including SEQ ID NO: 3. In some embodiments, the subject matter disclosed herein relates to a codon-optimized, isolated nucleic acid comprising a nucleic acid sequence encoding a monoclonal antibody including SEQ ID NO: 4. In some embodiments, the subject matter disclosed herein relates to a codon-optimized, isolated nucleic acid comprising a nucleic acid sequence encoding a monoclonal antibody including SEQ ID NO: 5. In some embodiments, the subject matter disclosed herein relates to a codon-optimized, isolated nucleic acid comprising a nucleic acid sequence encoding a monoclonal antibody including SEQ ID NO: 6. In some embodiments, the subject matter disclosed herein relates to a codon-optimized, isolated nucleic acid comprising a nucleic acid sequence encoding a monoclonal antibody including SEQ ID NO: 7. In some embodiments, the subject matter disclosed herein relates to a codon-optimized, isolated nucleic acid comprising a nucleic acid sequence encoding a monoclonal antibody including SEQ ID NO: 8. In some embodiments, the subject matter disclosed herein relates to a codon-optimized, isolated nucleic acid comprising a nucleic acid sequence encoding a monoclonal antibody including SEQ ID NO: 9. In some embodiments, the subject matter disclosed herein relates to a codon-optimized, isolated nucleic acid comprising a nucleic acid sequence encoding a monoclonal antibody including SEQ ID NO: 10. In some embodiments, the subject matter disclosed herein relates to a codon-optimized, isolated nucleic acid comprising a nucleic acid sequence encoding a monoclonal antibody including SEQ ID NO: 11. In some embodiments, the subject matter disclosed herein relates to a codon-optimized, isolated nucleic acid comprising a nucleic acid sequence encoding a monoclonal antibody including SEQ ID NO: 12. In some embodiments, the subject matter disclosed herein relates to a codon-optimized, isolated nucleic acid comprising a nucleic acid sequence encoding a monoclonal antibody including SEQ ID NO: 13. In some embodiments, the subject matter disclosed herein relates to a codon-optimized, isolated nucleic acid comprising a nucleic acid sequence encoding a monoclonal antibody including SEQ ID NO: 14. In some embodiments, the subject matter disclosed herein relates to a codon-optimized, isolated nucleic acid comprising a nucleic acid sequence encoding a monoclonal antibody including SEQ ID NO: 15. In some embodiments, the subject matter disclosed herein relates to a codon-optimized, isolated nucleic acid comprising a nucleic acid sequence encoding a monoclonal antibody including SEQ ID NO: 16. In some embodiments, the subject matter disclosed herein relates to a codon-optimized, isolated nucleic acid comprising a nucleic acid sequence encoding a monoclonal antibody including SEQ ID NO: 17. In some embodiments, the subject matter disclosed herein relates to a codon-optimized, isolated nucleic acid comprising a nucleic acid sequence encoding a monoclonal antibody including SEQ ID NO: 18. In some embodiments, the subject matter disclosed herein relates to a codon-optimized, isolated nucleic acid comprising a nucleic acid sequence encoding a monoclonal antibody including SEQ ID NO: 19. In some embodiments, the subject matter disclosed herein relates to a codon-optimized, isolated nucleic acid comprising a nucleic acid sequence encoding a monoclonal antibody including SEQ ID NO: 20. In some embodiments, the subject matter disclosed herein relates to a codon-optimized, isolated nucleic acid comprising a nucleic acid sequence encoding a monoclonal antibody including SEQ ID NO: 21. In some embodiments, the subject matter disclosed herein relates to a codon-optimized, isolated nucleic acid comprising a nucleic acid sequence encoding a monoclonal antibody including SEQ ID NO: 22. In some embodiments, the subject matter disclosed herein relates to a codon-optimized, isolated nucleic acid comprising a nucleic acid sequence encoding a monoclonal antibody including SEQ ID NO: 23. In some embodiments, the subject matter disclosed herein relates to a codon-optimized, isolated nucleic acid comprising a nucleic acid sequence encoding a monoclonal antibody including SEQ ID NO: 24. In some embodiments, the subject matter disclosed herein relates to a codon-optimized, isolated nucleic acid comprising a nucleic acid sequence encoding a monoclonal antibody including SEQ ID NO: 25. In some embodiments, the subject matter disclosed herein relates to a codon-optimized, isolated nucleic acid comprising a nucleic acid sequence encoding a monoclonal antibody including SEQ ID NO: 26. In some embodiments, the subject matter disclosed herein relates to a codon-optimized, isolated nucleic acid comprising a nucleic acid sequence encoding a monoclonal antibody including SEQ ID NO: 27. In some embodiments, the subject matter disclosed herein relates to a codon-optimized, isolated nucleic acid comprising a nucleic acid sequence encoding a monoclonal antibody including SEQ ID NO: 28. In some embodiments, the subject matter disclosed herein relates to a codon-optimized, isolated nucleic acid comprising a nucleic acid sequence encoding a monoclonal antibody including SEQ ID NO: 29. In some embodiments, the subject matter disclosed herein relates to a codon-optimized, isolated nucleic acid comprising a nucleic acid sequence encoding a monoclonal antibody including SEQ ID NO: 30. In some embodiments, the subject matter disclosed herein relates to a codon-optimized, isolated nucleic acid comprising a nucleic acid sequence encoding a monoclonal antibody including SEQ ID NO: 31. In some embodiments, the subject matter disclosed herein relates to a codon-optimized, isolated nucleic acid comprising a nucleic acid sequence encoding a monoclonal antibody including SEQ ID NO: 32. In some embodiments, the subject matter disclosed herein relates to a codon-optimized, isolated nucleic acid comprising a nucleic acid sequence encoding a monoclonal antibody including SEQ ID NO: 33. In some embodiments, the subject matter disclosed herein relates to a codon-optimized, isolated nucleic acid comprising a nucleic acid sequence encoding a monoclonal antibody including SEQ ID NO: 34. In some embodiments, the subject matter disclosed herein relates to a codon-optimized, isolated nucleic acid comprising a nucleic acid sequence encoding a monoclonal antibody including SEQ ID NO: 35. In some embodiments, the subject matter disclosed herein relates to a codon-optimized, isolated nucleic acid comprising a nucleic acid sequence encoding a monoclonal antibody including SEQ ID NO: 36. In some embodiments, the subject matter disclosed herein relates to a codon-optimized, isolated nucleic acid comprising a nucleic acid sequence encoding a monoclonal antibody including SEQ ID NO: 37. In some embodiments, the subject matter disclosed herein relates to a codon-optimized, isolated nucleic acid comprising a nucleic acid sequence encoding a monoclonal antibody including SEQ ID NO: 38. In some embodiments, the subject matter disclosed herein relates to a codon-optimized, isolated nucleic acid comprising a nucleic acid sequence encoding a monoclonal antibody including SEQ ID NO: 39. In some embodiments, the subject matter disclosed herein relates to a codon-optimized, isolated nucleic acid comprising a nucleic acid sequence encoding a monoclonal antibody including SEQ ID NO: 40. In some embodiments, the subject matter disclosed herein relates to a codon-optimized, isolated nucleic acid comprising a nucleic acid sequence encoding a monoclonal antibody including SEQ ID NO: 41. In some embodiments, the subject matter disclosed herein relates to a codon-optimized, isolated nucleic acid comprising a nucleic acid sequence encoding a monoclonal antibody including SEQ ID NO: 42. In some embodiments, the subject matter disclosed herein relates to a codon-optimized, isolated nucleic acid comprising a nucleic acid sequence encoding a monoclonal antibody including SEQ ID NO: 43. In some embodiments, the subject matter disclosed herein relates to a codon-optimized, isolated nucleic acid comprising a nucleic acid sequence encoding a monoclonal antibody including SEQ ID NO: 44. In some embodiments, the subject matter disclosed herein relates to a codon-optimized, isolated nucleic acid comprising a nucleic acid sequence encoding a monoclonal antibody including SEQ ID NO: 45. In some embodiments, the subject matter disclosed herein relates to a codon-optimized, isolated nucleic acid comprising a nucleic acid sequence encoding a monoclonal antibody including SEQ ID NO: 46.

[0630] In some embodiments, the subject matter disclosed herein relates to a pharmaceutical composition comprising an isolated nucleic acid having a nucleotide sequence encoding any of the antibodies of the present disclosure and a pharmaceutically acceptable carrier. In some embodiments, the subject matter disclosed herein relates to a pharmaceutical composition comprising a codon-optimized, isolated nucleic acid having a nucleotide sequence encoding any of the antibodies of the present disclosure and a pharmaceutically acceptable carrier.

[0631] COVID-19 Therapeutics with Bispecific Antibodies

[0632] Monoclonal antibodies are homogeneous in their nature of interaction with the ligands/antigens and thereby generate an absolute mono-specificity for their target. However, sometimes this absolute specificity for a single antigen target can result in some limitations for treating agents such as viruses that are known to evolve their target epitopes and thereby escape from the targeting by monoclonal antibodies. To overcome such limitations, scientists have generated antibodies which can be engineered to target multiple epitopes using a single antibody-like molecule. These antibody-like molecules can bind two separate antigens at the same time and are referred to as “bispecific” antibodies. Their framework is composed of fragments of two monoclonal antibodies whose regions have a binding affinity to two separate antigens. Such a framework can be useful in binding antigens that are unconventional or rare. In some embodiments, the subject matter described herein relates to generating bispecific antibodies capable of neutralizing the SARS-CoV-2 virus and or variant strains.

[0633] The SARS-CoV-2 bispecific antibodies described herein can be used for treatment of subjects infected with SARS-CoV-2 or a variant strain. In some embodiments, the bispecific antibodies described herein reduce viral load in a subject in need thereof. In some embodiments, the bispecific antibodies described herein decrease disease severity in a subject in need thereof. In some embodiments, the bispecific antibodies described herein improve clinical outcome of COVID-19 in subjects in need thereof.

[0634] In some embodiments, the bispecific antibodies described herein can be used as prophylaxis to prevent high risk subjects and individuals from becoming infected with SARS-CoV-2 or a variant strain. In some embodiments, the high risk subject can be healthcare workers in close proximity to COVID-19 patients or the family members of these healthcare workers. In some embodiments, the bispecific antibodies described herein can be used as prophylaxis for the general population at large.

[0635] In some embodiments, more potent antibodies require smaller amounts to be administered to the subject to achieve the desired COVID-19-related recovery effects. This can be through lower dosages administered to the subjects and therefore less potential side effects, less frequent dosing regimens, or lower antibody production costs. In some embodiments, potency is measured by IC50 and IC90 concentration values.

[0636] In some embodiments, the bispecific antibodies described herein target multiple epitopes on the SARS-CoV-2 virus or a variant strain. In some embodiments, the subject matter disclosed herein relates to bispecific antibody combination cocktails. In some embodiments, the antibodies in the cocktails target multiple epitopes on the SARS-CoV-2 virus or a variant strain. In some embodiments, the bispecific antibody combination cocktails provide even greater efficacy and lower the possibility of viral resistance than each individual antibody of the cocktail. In some embodiments, the bispecific antibodies described herein can be utilized in laboratory research and development activities. In one embodiment, the bispecific antibodies describe herein includes the variable regions of a first and a second antibody, in which the first antibody binds to an epitope on the receptor binding domain (RBD) of the coronavirus, while the second binds to an epitope on the N-terminal domain (NTD) of the coronavirus.

[0637] Pairing the anti-RBD and the anti-NTD domain antibodies in such a bispecific format would mainly provide for increasing the genetic barrier for the virus to achieve resistance against the antibodies. It also allows clinical practitioners to only administer a single formulation of one bispecific antibody to patients thereby simplifying treatment. In some embodiments, the bispecific antibodies are administered in a cocktail of two or more antibodies. As for marketing and supply chain benefits, bispecific antibodies present an economical alternative to producing in a single molecule format, those combinations of monoclonal antibodies known to increase the threshold of resistance to SARS-CoV-2.

[0638] In one embodiment, the subject matter disclosed herein relates to bispecific antibodies engineered for treatment and prevention of COVID-19 infections. Engineered bispecific antibodies can combine the binding specificity of two antibodies in only one molecule. Bispecific antibodies can recognize two antigens on different cells or on the same cell. Thus, by virtue of specifically binding the two antigens, engineered bispecific antibodies can bring two cells in close proximity or activate two receptors simultaneously. Additionally, blocking two target proteins with one antibody instead of two may be more efficient. In some embodiments, bispecific antibodies can target two viral epitopes providing higher barrier for viral escape. In some embodiments, bispecific antibodies can have synergetic effect on potency against the viral target.

[0639] In one embodiment, the engineered antibodies achieve bispecificity using the CrossMab format (Schaefer, 2011). The CrossMab engineering format allows for the bispecific antibody to adopt a more native antibody-like structure. This can facilitate binding of the bispecific antibody to weakly-expressed antigens, while avoiding overstimulation of immune responses. In some embodiments, bispecific antibodies in the CrossMab format can be anchored to a host cell membrane. This allows for improved local antibody concentration, targeting of sequential and/or interdependent virus entry steps, and compensating for monovalent binding.

[0640] As described herein, the CrossMab format for engineering bispecific antibodies can be utilized to engineer bispecific antibodies against the SARS-CoV-2 virus or a variant strain. As shown in FIG. 41, the creation of a “knob” in one heavy chain and a “hole” in the other heavy chain of the bispecific antibody favors the formation of heavy chain heterodimers, while the “crossover” of CL and CH1 sequences (the constant domains, heavy and light chains) in one arm of the antibody favors correct Heavy-Light chain pairings in both arms. The CrossMab format allows for correct assembly of two heavy chains and two light chains from different parental antibodies into one bispecific antibody molecule that resembles a typical monoclonal antibody in terms of mass and architecture, and with no artificial linkers required. Each antibody arm can be selected from different potent neutralizing antibodies against SARS-CoV-2 or a variant strain. Other bispecific formats that bring together the particular SARS-CoV-2 antibody combinations described herein can yield similar neutralization activities. As shown in FIG. 41, human IgG isotype 1 Fc can be engineered for reduced Fc-effector function with the L234F, L235E and P331S mutations and for half-life with the M428L and N434S mutations.

[0641] In one embodiment, the bispecific antibody comprises two polypeptide chains, one from each parental monoclonal antibody. In one embodiment, the first parental polypeptide arm comprises the light chain and the heavy chain polypeptides of the first parental antibody. The light chain can include the light chain variable domain (VL) comprising the light chain binding region and the light chain constant domain (CL) if the first parental antibody. The heavy chain can include the heavy chain variable domain (VH) comprising the heavy chain binding region and the heavy chain constant domain (CH) of the first parental antibody. In one embodiment, the first parental polypeptide arm also includes a domain, which promotes heterodimerization with the second polypeptide. In one embodiment, this heterodimerization domain can covalently bond the first parental polypeptide to the second parental polypeptide of the bispecific antibody.

[0642] In one embodiment, the second parental polypeptide arm comprises a light chain and a heavy chain polypeptides of the second parental antibody. The light chain can include the light chain variable domain (VL) comprising the light chain binding region and the light chain constant domain (CL) of the second parental antibody. The heavy chain can include the heavy chain variable domain (VH) comprising the heavy chain binding region and the heavy chain constant domain (CH) of the second parental antibody. In one embodiment, the second parental polypeptide arm also includes a domain, which promotes heterodimerization with the second polypeptide. In one embodiment, this heterodimerization domain can covalently bond the first parental polypeptide to the second parental polypeptide of the bispecific antibody. In one embodiment, the bispecific antibody further comprises linkers and disulfide bonds connecting the two parental polypeptides of the antibody. The linkers can be any suitable sequence of amino acids. In one embodiment, the The bispecific antibodies described herein include the variable regions of a first and a second antibody, in which the first antibody binds to an epitope on the receptor binding domain (RBD) of the coronavirus and is selected from 8 monoclonal Abs (1-20, 1-57, 2-7, 2-15, 2-30, 2-36, 2-43 and 4-20) while the second binds to an epitope on the N-terminal domain (NTD) of the coronavirus and is also selected from 8 monoclonal Abs (1-68, 1-87, 2-17, 2-51, 4-8, 4-18, 4-19 and 5-24).

[0643] The CrossMabs described herein utilize human IgG isotype 1 Fc backbone. The backbone can have additional mutations engineered for reduced Fc-effector function with the L234F, L235E and P331S mutations and for half-life with the M428L and N434S mutations.

[0644] In order to generate bispecific antibodies that would meet these goals, 58 candidate bispecific Abs were screened for their potency against SARS-CoV-2 live infectious virus using an in vitro assay. Briefly, purified candidate bispecific Ab was mixed with infectious live virus for 60 min and then added to a monolayer of Vero E6 cells to measure the extent of neutralization. Antibodies were diluted 5 fold from 10 μg/mL while virus was incubated with cells at MOI=0.1. Three days post infection, the cells were measured for the cytopathic effects induced by the live virus replication. Difference in the extent of infection from the control wells bearing no antibodies was converted to percentage and the value for inhibition of 50% of the virus (IC50) and 90% of the virus (IC90) was calculated using non-linear regression analysis.

[0645] Using the potency values, the bispecific antibodies of merit were nominated based on their fold enhancement of the IC₉₀ concentrations that they achieved in comparison to their parental antibodies. Bispecific antibodies that had a potency with IC₅₀≤10 ng/mL and with IC₉₀≤50 ng/mL were chosen as the ones that would be capable of achieving the greatest barrier to resistance by SARS-CoV-2. Ab X and Ab Y are irrelevant single arm Fab controls. Selected bispecific antibody candidates achieve similar potency as co-administration of the two parental mAbs.

[0646] SARS-CoV-2 Variant Strains

[0647] In some embodiments, the bispecific antibodies exhibit neutralization activity against wild-type SARS-CoV-2 virus (WA1). In some embodiments, the bispecific antibodies exhibit neutralization activity against SARS-CoV-2 variants. In some embodiments, the bispecific antibodies disclosed herein show potent neutralization activities against SARS-CoV-2 wild-type and multiple variant virus strains. In some embodiments, the SARS-CoV-2 variants are B.1.1.7 (UK variant), B.1.351 (SA variant), B.1.526 (NY variant), or P.1 (Brazil variant).

[0648] In one embodiment, each arm of the bispecific antibody constructed is selected from 19 potent neutralizing antibodies against SARS-CoV-2. Additional bispecific antibodies 2-7/5-7, 2-7/1-57 and the CrossMab formats with reverse the knob and hole arms, namely 5-7/2-7 or 1-57/2-7, showed high potencies when tested against the wild-type virus. As 1-57 activity can be impacted by SARS-CoV-2 variant containing L452R mutation (such as California variant), which crashes mAb 1-57 heavy chain binding suggested by structural modeling, 2-7/5-7 was down-selected as development candidate and further characterized by neutralization against SARS-CoV-2 variants and showed potent neutralization against new emerging variants such as B.1.1.7 (UK variant), B.1.351 (SA variant), B.1.526 (NY variant) and P.1 (BZ variant). For many of the bispecific antibodies tested herein, both arms of the bispecific antibodies contribute to the neutralization activity of the bispecific molecule. These bispecific antibodies with potent neutralization activities against SARS-CoV-2 and the variants offer new therapeutics for the treatment and prevention of COVID-19, as a single antibody molecule to provide a higher genetic barrier for viral escape and lower cost than antibody combination. We expect the activity enhancement observed can be extended to other engineered bispecific antibody format.

[0649] Antibody Sequences for Bispecific Antibodies

[0650] Underlined and italicized amino acids represent the respective complementarity-determining regions (CDRs). There are three CDRs per sequence, appearing on the sequence in the order CDR1, CDR2, and CDR3.

[0651] The 2-17/2-7 bispecific antibody sequence can comprise:

[0652] SEQ ID NO: 47 is the amino acid sequence defining the 2-17 derived heavy chain of the 2-17/2-7 antibody 2-17HC-Hole-Cross

QVQLVQSGAEVKKPGSSVKVSCKASGGTFSSYAISWVRQAPGQGLEWMGG
NIPIFGTANYAQKFQGRVTITADESTSTAYMELSSLRSEDTAVYYCARGV
GYRGVIPLNWFDPWGQGTVVTVSSASTAAPSVFIFPPSDEQLKSGTASVV
CLLNNFYPREAKVQWKVDNALQSGNSQESVTEQDSKDSTYSLSSTLTLSK
ADYEKHKVYACEVTHQGLSSPVTKSFNRGECDKTHTCPPCPAPEFEGGPS
VFLFPPKPKDTLMISRTPEVTCVVVDVSHEDPEVKFNWYVDGVEVHNAKT
KPREEQYNSTYRVVSVLTVLHQDWLNGKEYKCKVSNKALPASIEKTISKA
KGQPREPQVCTLPPSRDELTKNQVSLSCAVKGFYPSDIAVEWESNGQPEN
NYKTTPPVLDSDGSFFLVSKLTVDKSRWQQGNVFSCSVLHEALHSHYTQK
SLSLSPGK

[0653] SEQ ID NO: 48 is the amino acid sequence defining the 2-17 derived Light chain of the 2-17/2-7 antibody 2-17VLCH1

EIVMTQSPATLSVSPGERATLSCRASQSVSSDLAWYQHKPGQAPRLLIYG
ASTRATGIPVRFSGSGSGTEFTLTISSLQSEDFAVYYCQQYNNWPPFTFG
GGTKVEIKSSASTKGPSVFPLAPSSKSTSGGTAALGCLVKDYFPEPVTVS
WNSGALTSGVHTFPAVLQSSGLYSLSSVVTVPSSSLGTQTYICNVNHKPS
NTKVDKKVEPKSC

[0654] SEQ ID NO: 49 is the amino acid sequence defining the 2-7 derived heavy chain of the 2-17/2-7 antibody 2-7HC-Knob

QITLKESGPTLVKPTQTLTLTCTFSGFSLSTSGVGVGWIRQPPGKALEWL
ALIYWDDDKRYSPSLKSRLTITKDTSKNQVVLTMTNMDPVDTATYYCAHH
KIERIFDYWGQGTLVTVSSASTKGPSVFPLAPSSKSTSGGTAALGCLVKD
YFPEPVTVSWNSGALTSGVHTFPAVLQSSGLYSLSSVVTVPSSSLGTQTY
ICNVNHKPSNTKVDKKVEPKSCDKTHTCPPCPAPEFEGGPSVFLFPPKPK
DTLMISRTPEVTCVVVDVSHEDPEVKFNWYVDGVEVHNAKTKPREEQYNS
TYRVVSVLTVLHQDWLNGKEYKCKVSNKALPASIEKTISKAKGQPREPQV
YTLPPCRDELTKNQVSLWCLVKGFYPSDIAVEWESNGQPENNYKTTPPVL
DSDGSFFLYSKLTVDKSRWQQGNVFSCSVLHEALHSHYTQKSLSLSPGK

[0655] SEQ ID NO: 50 is the amino acid sequence defining the 2-7 derived light chain of the 2-17/2-7 antibody 2-7LC

QSALAQPASVSGSPGQSITISCTGTSSDVGAYNYVSWYQQHPGKAPKLMI
YDVSKRPSGVSNRFSGSKSGNTASLTISGLQAEDEADYYCSSYTTSSTVF
GGGTKLTVLGQPKAAPSVTLFPPSSEELQANKATLVCLISDFYPGAVTVA
WKADSSPVKAGVETTTPSKQSNNKYAASSYLSLTPEQWKSHRSYSCQVTH
EGSTVEKTVAPTECS

[0656] The 1-57/5-7 bispecific antibody sequence can comprise:

[0657] SEQ ID NO: 51 is the amino acid sequence defining the 1-57 derived heavy chain of the 1-57/5-7 antibody 1-57HC-Hole-Cross

EVHLVESGGGLVQPGGSLRLSCAASGFTFSDHYMDWVRQAPGKGLEWVGR
TRNKANSYTTEYAASVKGRFTISRDDAKNSLYLQMNSLKTEDTAVYYCAR
VHRWAYCINGVCFGAYSDYWGQGTLVTVSSASTAAPSVFIFPPSDEQLKS
GTASVVCLLNNFYPREAKVQWKVDNALQSGNSQESVTEQDSKDSTYSLSS
TLTLSKADYEKHKVYACEVTHQGLSSPVTKSFNRGECDKTHTCPPCPAPE
FEGGPSVFLFPPKPKDTLMISRTPEVTCVVVDVSHEDPEVKFNWYVDGVE
VHNAKTKPREEQYNSTYRVVSVLTVLHQDWLNGKEYKCKVSNKALPASIE
KTISKAKGQPREPQVCTLPPSRDELTKNQVSLSCAVKGFYPSDIAVEWES
NGQPENNYKTTPPVLDSDGSFFLVSKLTVDKSRWQQGNVFSCSVLHEALH
SHYTQKSLSLSPGK

[0658] SEQ ID NO: 52 is the amino acid sequence defining the 1-57 derived light chain of the 1-57/5-7 antibody 1-57VLCH1

EIVLTQSPGTLSLSPGERATLSCRASQSVSSSYLAWYQQKPGQAPRLLIY
GASSRATGIPDRFSGSGSGTDFTLTISRLEPEDFAVYYCQQYGSSPSTFG
QGTKLEIKSSASTKGPSVFPLAPSSKSTSGGTAALGCLVKDYFPEPVTVS
WNSGALTSGVHTFPAVLQSSGLYSLSSVVTVPSSSLGTQTYICNVNHKPS
NTKVDKKVEPKSC

[0659] SEQ ID NO: 53 is the amino acid sequence defining the 5-7 derived heavy chain of the 1-57/5-7 antibody 5-7 HC-Knob

QVQLVQSGAEVKKPGASVKVSCKASGYTFTSYYMHWVRQAPGQGLEWMGV
INPSGGSTSYAEKFRGRVTMTRDTSTSTVYMELSSLRSEDTAVYYCARDR
EPHSDSSGYWDSLKYYYYYALDVWGQGTTVTVSSASTKGPSVFPLAPSSK
STSGGTAALGCLVKDYFPEPVTVSWNSGALTSGVHTFPAVLQSSGLYSLS
SVVTVPSSSLGTQTYICNVNHKPSNTKVDKKVEPKSCDKTHTCPPCPAPE
FEGGPSVFLFPPKPKDTLMISRTPEVTCVVVDVSHEDPEVKFNWYVDGVE
VHNAKTKPREEQYNSTYRVVSVLTVLHQDWLNGKEYKCKVSNKALPASIE
KTISKAKGQPREPQVYTLPPCRDELTKNQVSLWCLVKGFYPSDIAVEWES
NGQPENNYKTTPPVLDSDGSFFLYSKLTVDKSRWQQGNVFSCSVLHEALH
SHYTQKSLSLSPGK

[0660] SEQ ID NO: 54 is the amino acid sequence defining the 5-7 derived light chain of the 1-57/5-7 antibody 5-7LC

AIQLTQSPSSLSASVGDRVTITCRASQGISSYLAWYQQKPGKAPELLIYA
ASTLQSGVPSRFSGSGSGTDFTLTISSLQPEDFATYYCQQLNTYPFTFGP
GTKVDIKRTVAAPSVFIFPPSDEQLKSGTASVVCLLNNFYPREAKVQWKV
DNALQSGNSQESVTEQDSKDSTYSLSSTLTLSKADYEKHKVYACEVTHQG
LSSPVTKSFNRGEC

[0661] The 5-7/1-57 bispecific antibody sequence can comprise:

[0662] SEQ ID NO: 55 is the amino acid sequence defining the 5-7 derived heavy chain of the 5-7/1-57 antibody 5-7HC-Hole-Cross

QVQLVQSGAEVKKPGASVKVSCKASGYTFTSYYMHWVRQAPGQGLEWMGV
INPSGGSTSYAEKFRGRVTMTRDTSTSTVYMELSSLRSEDTAVYYCARDR
EPHSDSSGYWDSLKYYYYYALDVWGQGTTVTVSSASTAAPSVFIFPPSDE
QLKSGTASVVCLLNNFYPREAKVQWKVDNALQSGNSQESVTEQDSKDSTY
SLSSTLTLSKADYEKHKVYACEVTHQGLSSPVTKSFNRGECDKTHTCPPC
PAPEFEGGPSVFLFPPKPKDTLMISRTPEVTCVVVDVSHEDPEVKFNWYV
DGVEVHNAKTKPREEQYNSTYRVVSVLTVLHQDWLNGKEYKCKVSNKALP
ASIEKTISKAKGQPREPQVCTLPPSRDELTKNQVSLSCAVKGFYPSDIAV
EWESNGQPENNYKTTPPVLDSDGSFFLVSKLTVDKSRWQQGNVFSCSVLH
EALHSHYTQKSLSLSPGK

[0663] SEQ ID NO: 56 is the amino acid sequence defining the 5-7 derived Light chain of the 5-7/1-57 antibody 5-7VLCH1

AIQLTQSPSSLSASVGDRVTITCRASQGISSYLAWYQQKPGKAPELLIYA
ASTLQSGVPSRFSGSGSGTDFTLTISSLQPEDFATYYCQQLNTYPFTFGP
GTKVDIKSSASTKGPSVFPLAPSSKSTSGGTAALGCLVKDYFPEPVTVSW
NSGALTSGVHTFPAVLQSSGLYSLSSVVTVPSSSLGTQTYICNVNHKPSN
TKVDKKVEPKSC

[0664] SEQ ID NO: 57 is the amino acid sequence defining the 1-57 derived heavy chain of the 5-7/1-57 antibody 1-57HC-Knob

EVHLVESGGGLVQPGGSLRLSCAASGFTFSDHYMDWVRQAPGKGLEWVGR
TRNKANSYTTEYAASVKGRFTISRDDAKNSLYLQMNSLKTEDTAVYYCAR
VHRWAYCINGVCFGAYSDYWGQGTLVTVSSASTKGPSVFPLAPSSKSTSG
GTAALGCLVKDYFPEPVTVSWNSGALTSGVHTFPAVLQSSGLYSLSSVVT
VPSSSLGTQTYICNVNHKPSNTKVDKKVEPKSCDKTHTCPPCPAPEFEGG
PSVFLFPPKPKDTLMISRTPEVTCVVVDVSHEDPEVKFNWYVDGVEVHNA
KTKPREEQYNSTYRVVSVLTVLHQDWLNGKEYKCKVSNKALPASIEKTIS
KAKGQPREPQVYTLPPCRDELTKNQVSLWCLVKGFYPSDIAVEWESNGQP
ENNYKTTPPVLDSDGSFFLYSKLTVDKSRWQQGNVFSCSVLHEALHSHYT
QKSLSLSPGK

[0665] SEQ ID NO: 58 is the amino acid sequence defining the 1-57 derived light chain of the 5-7/1-57 antibody 1-57LC

EIVLTQSPGTLSLSPGERATLSCRASQSVSSSYLAWYQQKPGQAPRLLIY
GASSRATGIPDRFSGSGSGTDFTLTISRLEPEDFAVYYCQQYGSSPSTFG
QGTKLEIKRTVAAPSVFIFPPSDEQLKSGTASVVCLLNNFYPREAKVQWK
VDNALQSGNSQESVTEQDSKDSTYSLSSTLTLSKADYEKHKVYACEVTHQ
GLSSPVTKSFNRGEC

[0666] The 2-7/5-7 bispecific antibody sequence can comprise:

[0667] SEQ ID NO: 59 is the amino acid sequence defining the 2-7 derived heavy chain of the 2-7/5-7 antibody 2-7HC-Hole-Cross

QITLKESGPTLVKPTQTLTLTCTFSGFSLSTSGVGVGWIRQPPGKALEWL
ALIYWDDDKRYSPSLKSRLTITKDTSKNQVVLTMTNMDPVDTATYYCAHH
KIERIFDYWGQGTLVTVSSASTAAPSVFIFPPSDEQLKSGTASVVCLLNN
FYPREAKVQWKVDNALQSGNSQESVTEQDSKDSTYSLSSTLTLSKADYEK
HKVYACEVTHQGLSSPVTKSFNRGECDKTHTCPPCPAPEFEGGPSVFLFP
PKPKDTLMISRTPEVTCVVVDVSHEDPEVKFNWYVDGVEVHNAKTKPREE
QYNSTYRVVSVLTVLHQDWLNGKEYKCKVSNKALPASIEKTISKAKGQPR
EPQVCTLPPSRDELTKNQVSLSCAVKGFYPSDIAVEWESNGQPENNYKTT
PPVLDSDGSFFLVSKLTVDKSRWQQGNVFSCSVLHEALHSHYTQKSLSLS
PGK

[0668] SEQ ID NO: 60 is the amino acid sequence defining the 2-7 derived light chain of the 2-7/5-7 antibody 2-7VLCH1

QSALAQPASVSGSPGQSITISCTGTSSDVGAYNYVSWYQQHPGKAPKLMI
YDVSKRPSGVSNRFSGSKSGNTASLTISGLQAEDEADYYCSSYTTSSTVF
GGGTKLTVLSSASTKGPSVFPLAPSSKSTSGGTAALGCLVKDYFPEPVTV
SWNSGALTSGVHTFPAVLQSSGLYSLSSVVTVPSSSLGTQTYICNVNHKP
SNTKVDKKVEPKSC

[0669] SEQ ID NO: 61 is the amino acid sequence defining the 5-7 derived heavy chain of the 2-7/5-7 antibody 5-7 HC-Knob

QVQLVQSGAEVKKPGASVKVSCKASGYTFTSYYMHWVRQAPGQGLEWMGV
INPSGGSTSYAEKFRGRVTMTRDTSTSTVYMELSSLRSEDTAVYYCARDR
EPHSDSSGYWDSLKYYYYYALDVWGQGTTVTVSSASTKGPSVFPLAPSSK
STSGGTAALGCLVKDYFPEPVTVSWNSGALTSGVHTFPAVLQSSGLYSLS
SVVTVPSSSLGTQTYICNVNHKPSNTKVDKKVEPKSCDKTHTCPPCPAPE
FEGGPSVFLFPPKPKDTLMISRTPEVTCVVVDVSHEDPEVKFNWYVDGVE
VHNAKTKPREEQYNSTYRVVSVLTVLHQDWLNGKEYKCKVSNKALPASIE
KTISKAKGQPREPQVYTLPPCRDELTKNQVSLWCLVKGFYPSDIAVEWES
NGQPENNYKTTPPVLDSDGSFFLYSKLTVDKSRWQQGNVFSCSVLHEALH
SHYTQKSLSLSPGK

[0670] SEQ ID NO: 62 is the amino acid sequence defining the 5-7 derived light chain of the 2-7/5-7 antibody 5-7LC

AIQLTQSPSSLSASVGDRVTITCRASQGISSYLAWYQQKPGKAPELLIYA
ASTLQSGVPSRFSGSGSGTDFTLTISSLQPEDFATYYCQQLNTYPFTFGP
GTKVDIKRTVAAPSVFIFPPSDEQLKSGTASVVCLLNNFYPREAKVQWKV
DNALQSGNSQESVTEQDSKDSTYSLSSTLTLSKADYEKHKVYACEVTHQG
LSSPVTKSFNRGEC

[0671] The 5-7/2-7 bispecific antibody sequence can comprise:

[0672] SEQ ID NO: 63 is the amino acid sequence defining the 5-7 derived heavy chain of the 5-7/2-7 antibody 5-7HC-Hole-Cross

QVQLVQSGAEVKKPGASVKVSCKASGYTFTSYYMHWVRQAPGQGLEWMGV
INPSGGSTSYAEKFRGRVTMTRDTSTSTVYMELSSLRSEDTAVYYCARDR
EPHSDSSGYWDSLKYYYYYALDVWGQGTTVTVSSASTAAPSVFIFPPSDE
QLKSGTASVVCLLNNFYPREAKVQWKVDNALQSGNSQESVTEQDSKDSTY
SLSSTLTLSKADYEKHKVYACEVTHQGLSSPVTKSFNRGECDKTHTCPPC
PAPEFEGGPSVFLFPPKPKDTLMISRTPEVTCVVVDVSHEDPEVKFNWYV
DGVEVHNAKTKPREEQYNSTYRVVSVLTVLHQDWLNGKEYKCKVSNKALP
ASIEKTISKAKGQPREPQVCTLPPSRDELTKNQVSLSCAVKGFYPSDIAV
EWESNGQPENNYKTTPPVLDSDGSFFLVSKLTVDKSRWQQGNVFSCSVLH
EALHSHYTQKSLSLSPGK

[0673] SEQ ID NO: 64 is the amino acid sequence defining the 5-7 derived Light chain of the 5-7/2-7 antibody 5-7VLCH1

AIQLTQSPSSLSASVGDRVTITCRASQGISSYLAWYQQKPGKAPELLIYA
ASTLQSGVPSRFSGSGSGTDFTLTISSLQPEDFATYYCQQLNTYPFTFGP
GTKVDIKSSASTKGPSVFPLAPSSKSTSGGTAALGCLVKDYFPEPVTVSW
NSGALTSGVHTFPAVLQSSGLYSLSSVVTVPSSSLGTQTYICNVNHKPSN
TKVDKKVEPKSC

[0674] SEQ ID NO: 65 is the amino acid sequence defining the 2-7 derived heavy chain of the 5-7/2-7 antibody 2-7HC-Knob

QITLKESGPTLVKPTQTLTLTCTFSGFSLSTSGVGVGWIRQPPGKALEWL
ALIYWDDDKRYSPSLKSRLTITKDTSKNQVVLTMTNMDPVDTATYYCAHH
KIERIFDYWGQGTLVTVSSASTKGPSVFPLAPSSKSTSGGTAALGCLVKD
YFPEPVTVSWNSGALTSGVHTFPAVLQSSGLYSLSSVVTVPSSSLGTQTY
ICNVNHKPSNTKVDKKVEPKSCDKTHTCPPCPAPEFEGGPSVFLFPPKPK
DTLMISRTPEVTCVVVDVSHEDPEVKFNWYVDGVEVHNAKTKPREEQYNS
TYRVVSVLTVLHQDWLNGKEYKCKVSNKALPASIEKTISKAKGQPREPQV
YTLPPCRDELTKNQVSLWCLVKGFYPSDIAVEWESNGQPENNYKTTPPVL
DSDGSFFLYSKLTVDKSRWQQGNVFSCSVLHEALHSHYTQKSLSLSPGK

[0675] SEQ ID NO: 66 is the amino acid sequence defining the 2-7 derived light chain of the 5-7/2-7 antibody 2-7LC

QSALAQPASVSGSPGQSITISCTGTSSDVGAYNYVSWYQQHPGKAPKLMI
YDVSKRPSGVSNRFSGSKSGNTASLTISGLQAEDEADYYCSSYTTSSTVF
GGGTKLTVLGQPKAAPSVTLFPPSSEELQANKATLVCLISDFYPGAVTVA
WKADSSPVKAGVETTTPSKQSNNKYAASSYLSLTPEQWKSHRSYSCQVTH
EGSTVEKTVAPTECS

[0676] The 2-17/1-57 bispecific antibody sequence can comprise:

[0677] SEQ ID NO: 67 is the amino acid sequence defining the 2-17 derived heavy chain of the 2-17/1-57 antibody 2-17HC-Hole-Cross

QVQLVQSGAEVKKPGSSVKVSCKASGGTFSSYAISWVRQAPGQGLEWMGG
NIPIFGTANYAQKFQGRVTITADESTSTAYMELSSLRSEDTAVYYCARGV
GYRGVIPLNWFDPWGQGTVVTVSSASTAAPSVFIFPPSDEQLKSGTASVV
CLLNNFYPREAKVQWKVDNALQSGNSQESVTEQDSKDSTYSLSSTLTLSK
ADYEKHKVYACEVTHQGLSSPVTKSFNRGECDKTHTCPPCPAPEFEGGPS
VFLFPPKPKDTLMISRTPEVTCVVVDVSHEDPEVKFNWYVDGVEVHNAKT
KPREEQYNSTYRVVSVLTVLHQDWLNGKEYKCKVSNKALPASIEKTISKA
KGQPREPQVCTLPPSRDELTKNQVSLSCAVKGFYPSDIAVEWESNGQPEN
NYKTTPPVLDSDGSFFLVSKLTVDKSRWQQGNVFSCSVLHEALHSHYTQK
SLSLSPGK

[0678] SEQ ID NO: 68 is the amino acid sequence defining the 2-17 derived light chain of the 2-17/1-57 antibody 2-17VLCH1

EIVMTQSPATLSVSPGERATLSCRASQSVSSDLAWYQHKPGQAPRLLIY
GASTRATGIPVRFSGSGSGTEFTLTISSLQSEDFAVYYCQQYNNWPPFT
FGGGTKVEIKSSASTKGPSVFPLAPSSKSTSGGTAALGCLVKDYFPEPV
TVSWNSGALTSGVHTFPAVLQSSGLYSLSSVVTVPSSSLGTQTYICNVN
HKPSNTKVDKKVEPKSC

[0679] SEQ ID NO: 69 is the amino acid sequence defining the 1-57 derived heavy chain of the 2-17/1-57 antibody 1-57HC-Knob

EVHLVESGGGLVQPGGSLRLSCAASGFTFSDHYMDWVRQAPGKGLEWVG
RTRNKANSYTTEYAASVKGRFTISRDDAKNSLYLQMNSLKTEDTAVYYC
ARVHRWAYCINGVCFGAYSDYWGQGTLVTVSSASTKGPSVFPLAPSSKS
TSGGTAALGCLVKDYFPEPVTVSWNSGALTSGVHTFPAVLQSSGLYSLS
SVVTVPSSSLGTQTYICNVNHKPSNTKVDKKVEPKSCDKTHTCPPCPAP
EFEGGPSVFLFPPKPKDTLMISRTPEVTCVVVDVSHEDPEVKFNWYVDG
VEVHNAKTKPREEQYNSTYRVVSVLTVLHQDWLNGKEYKCKVSNKALPA
SIEKTISKAKGQPREPQVYTLPPCRDELTKNQVSLWCLVKGFYPSDIAV
EWESNGQPENNYKTTPPVLDSDGSFFLYSKLTVDKSRWQQGNVFSCSVL
HEALHSHYTQKSLSLSPGK

[0680] SEQ ID NO: 70 is the amino acid sequence defining the 1-57 derived light chain of the 2-17/1-57 antibody 1-57LC

EIVLTQSPGTLSLSPGERATLSCRASQSVSSSYLAWYQQKPGQAPRLLI
YGASSRATGIPDRFSGSGSGTDFTLTISRLEPEDFAVYYCQQYGSSPST
FGQGTKLEIKRTVAAPSVFIFPPSDEQLKSGTASVVCLLNNFYPREAKV
QWKVDNALQSGNSQESVTEQDSKDSTYSLSSTLTLSKADYEKHKVYACE
VTHQGLSSPVTKSFNRGEC

[0681] The 2-17/2-15 bispecific antibody sequence can comprise:

[0682] SEQ ID NO: 71 is the amino acid sequence defining the 2-17 derived heavy chain of the 2-17/2-15 antibody 2-17HC-Hole-Cross

QVQLVQSGAEVKKPGSSVKVSCKASGGTFSSYAISWVRQAPGQGLEWMG
GNIPIFGTANYAQKFQGRVTITADESTSTAYMELSSLRSEDTAVYYCAR
GVGYRGVIPLNWFDPWGQGTVVTVSSASTAAPSVFIFPPSDEQLKSGTA
SVVCLLNNFYPREAKVQWKVDNALQSGNSQESVTEQDSKDSTYSLSSTL
TLSKADYEKHKVYACEVTHQGLSSPVTKSFNRGECDKTHTCPPCPAPEF
EGGPSVFLFPPKPKDTLMISRTPEVTCVVVDVSHEDPEVKFNWYVDGVE
VHNAKTKPREEQYNSTYRVVSVLTVLHQDWLNGKEYKCKVSNKALPASI
EKTISKAKGQPREPQVCTLPPSRDELTKNQVSLSCAVKGFYPSDIAVEW
ESNGQPENNYKTTPPVLDSDGSFFLVSKLTVDKSRWQQGNVFSCSVLHE
ALHSHYTQKSLSLSPGK

[0683] SEQ ID NO: 72 is the amino acid sequence defining the 2-17 derived light chain of the 2-17/2-15 antibody 2-17VLCH1

EIVMTQSPATLSVSPGERATLSCRASQSVSSDLAWYQHKPGQAPRLLIY
GASTRATGIPVRFSGSGSGTEFTLTISSLQSEDFAVYYCQQYNNWPPFT
FGGGTKVEIKSSASTKGPSVFPLAPSSKSTSGGTAALGCLVKDYFPEPV
TVSWNSGALTSGVHTFPAVLQSSGLYSLSSVVTVPSSSLGTQTYICNVN
HKPSNTKVDKKVEPKSC

[0684] SEQ ID NO: 73 is the amino acid sequence defining the 2-15 derived heavy chain of the 2-17/2-15 antibody 2-15HC-Knob

QVQLVQSGAEVKKPGASVRVSCKASGYTFTGYYMHWVRQAPGQGLEWMG
WINPISDGTNYAQKFQGWVTMTRDTSISTVYMELSRLRSDDTAVYYCAR
GGSRCSGGNCYGWAYDAFDIWGQGTMITVSSASTKGPSVFPLAPSSKST
SGGTAALGCLVKDYFPEPVTVSWNSGALTSGVHTFPAVLQSSGLYSLSS
VVTVPSSSLGTQTYICNVNHKPSNTKVDKKVEPKSCDKTHTCPPCPAPE
FEGGPSVFLFPPKPKDTLMISRTPEVTCVVVDVSHEDPEVKFNWYVDGV
EVHNAKTKPREEQYNSTYRVVSVLTVLHQDWLNGKEYKCKVSNKALPAS
IEKTISKAKGQPREPQVYTLPPCRDELTKNQVSLWCLVKGFYPSDIAVE
WESNGQPENNYKTTPPVLDSDGSFFLYSKLTVDKSRWQQGNVFSCSVLH
EALHSHYTQKSLSLSPGK

[0685] SEQ ID NO: 74 is the amino acid sequence defining the 2-15 derived light chain of the 2-17/2-15 antibody 2-15LC

QSALTQPASVSGSPGQSITISCTGTSSDVGGYNFVSWYQQHPGKAPKLM
IYDVSKRPSGVSNRFSGSKSGNTASLTISGLQAEDEADCYCSSYTSSST
FVFGTGTKVTVLGQPKAAPSVTLFPPSSEELQANKATLVCLISDFYPGA
VTVAWKADSSPVKAGVETTTPSKQSNNKYAASSYLSLTPEQWKSHRSYS
CQVTHEGSTVEKTVAPTECS

[0686] The 2-17/2-30 bispecific antibody sequence can comprise:

[0687] SEQ ID NO: 75 is the amino acid sequence defining the 2-17 derived heavy chain of the 2-17/2-30 antibody 2-17HC-Hole-Cross

QVQLVQSGAEVKKPGSSVKVSCKASGGTFSSYAISWVRQAPGQGLEWMG
GNIPIFGTANYAQKFQGRVTITADESTSTAYMELSSLRSEDTAVYYCAR
GVGYRGVIPLNWFDPWGQGTVVTVSSASTAAPSVFIFPPSDEQLKSGTA
SVVCLLNNFYPREAKVQWKVDNALQSGNSQESVTEQDSKDSTYSLSSTL
TLSKADYEKHKVYACEVTHQGLSSPVTKSFNRGECDKTHTCPPCPAPEF
EGGPSVFLFPPKPKDTLMISRTPEVTCVVVDVSHEDPEVKFNWYVDGVE
VHNAKTKPREEQYNSTYRVVSVLTVLHQDWLNGKEYKCKVSNKALPASI
EKTISKAKGQPREPQVCTLPPSRDELTKNQVSLSCAVKGFYPSDIAVEW
ESNGQPENNYKTTPPVLDSDGSFFLVSKLTVDKSRWQQGNVFSCSVLHE
ALHSHYTQKSLSLSPGK

[0688] SEQ ID NO: 76 is the amino acid sequence defining the 2-17 derived light chain of the 2-17/2-30 antibody 2-17VLCH1

EIVMTQSPATLSVSPGERATLSCRASQSVSSDLAWYQHKPGQAPRLLIY
GASTRATGIPVRFSGSGSGTEFTLTISSLQSEDFAVYYCQQYNNWPPFT
FGGGTKVEIKSSASTKGPSVFPLAPSSKSTSGGTAALGCLVKDYFPEPV
TVSWNSGALTSGVHTFPAVLQSSGLYSLSSVVTVPSSSLGTQTYICNVN
HKPSNTKVDKKVEPKSC

[0689] SEQ ID NO: 77 is the amino acid sequence defining the 2-30 derived heavy chain of the 2-17/2-30 antibody 2-30 HC-Knob

QVQLVESGGGVVQPGRSLRLSCAASGFTFSSYTMHWVRQAPGKGLEWVA
AISYDGNNKYYADSVKGRFTISRDNSKNTLYLQMNSLRAEDTAVYYCAR
SILYGGGMDVWGQGTTVTVSSASTKGPSVFPLAPSSKSTSGGTAALGCL
VKDYFPEPVTVSWNSGALTSGVHTFPAVLQSSGLYSLSSVVTVPSSSLG
TQTYICNVNHKPSNTKVDKKVEPKSCDKTHTCPPCPAPEFEGGPSVFLF
PPKPKDTLMISRTPEVTCVVVDVSHEDPEVKFNWYVDGVEVHNAKTKPR
EEQYNSTYRVVSVLTVLHQDWLNGKEYKCKVSNKALPASIEKTISKAKG
QPREPQVYTLPPCRDELTKNQVSLWCLVKGFYPSDIAVEWESNGQPENN
YKTTPPVLDSDGSFFLYSKLTVDKSRWQQGNVFSCSVLHEALHSHYTQK
SLSLSPGK

[0690] SEQ ID NO: 78 is the amino acid sequence defining the 2-30 derived light chain of the 2-17/2-30 antibody 2-30 LC

DIQLTQSPSSLSASVGDRVTITCRASQGISSYLAWYQQKPGQAPKLLIY
AASTLQSGVPSRFSGSGSGTDFTLTISSLQPEDFATYYCQQLNSYPLTF
GGGTKVEIKRTVAAPSVFIFPPSDEQLKSGTASVVCLLNNFYPREAKVQ
WKVDNALQSGNSQESVTEQDSKDSTYSLSSTLTLSKADYEKHKVYACEV
THQGLSSPVTKSFNRGEC

[0691] The 2-17/4-20 bispecific antibody sequence can comprise:

[0692] SEQ ID NO: 79 is the amino acid sequence defining the 2-17 derived heavy chain of the 2-17/4-20 antibody 2-17HC-Hole-Cross

QVQLVQSGAEVKKPGSSVKVSCKASGGTFSSYAISWVRQAPGQGLEWMG
GNIPIFGTANYAQKFQGRVTITADESTSTAYMELSSLRSEDTAVYYCAR
GVGYRGVIPLNWFDPWGQGTVVTVSSASTAAPSVFIFPPSDEQLKSGTA
SVVCLLNNFYPREAKVQWKVDNALQSGNSQESVTEQDSKDSTYSLSSTL
TLSKADYEKHKVYACEVTHQGLSSPVTKSFNRGECDKTHTCPPCPAPEF
EGGPSVFLFPPKPKDTLMISRTPEVTCVVVDVSHEDPEVKFNWYVDGVE
VHNAKTKPREEQYNSTYRVVSVLTVLHQDWLNGKEYKCKVSNKALPASI
EKTISKAKGQPREPQVCTLPPSRDELTKNQVSLSCAVKGFYPSDIAVEW
ESNGQPENNYKTTPPVLDSDGSFFLVSKLTVDKSRWQQGNVFSCSVLHE
ALHSHYTQKSLSLSPGK

[0693] SEQ ID NO: 80 is the amino acid sequence defining the 2-17 derived light chain of the 2-17/4-20 antibody 2-17VLCH1

EIVMTQSPATLSVSPGERATLSCRASQSVSSDLAWYQHKPGQAPRLLIY
GASTRATGIPVRFSGSGSGTEFTLTISSLQSEDFAVYYCQQYNNWPPFT
FGGGTKVEIKSSASTKGPSVFPLAPSSKSTSGGTAALGCLVKDYFPEPV
TVSWNSGALTSGVHTFPAVLQSSGLYSLSSVVTVPSSSLGTQTYICNVN
HKPSNTKVDKKVEPKSC

[0694] SEQ ID NO: 81 is the amino acid sequence defining the 4-20 derived heavy chain of the 2-17/4-20 antibody 4-20 HC-Knob

QVQLLQSGAEVKKPGASVKVSCKASGYSFTSYYMHWVRQAPGQGLEWMG
IINPSGGGTTYAQKFQGRVTMTRDTSTSTVYMELSSLRSEDTAVYYCAR
PGGGSYQEFDYWGQGTLVTVSSASTKGPSVFPLAPSSKSTSGGTAALGC
LVKDYFPEPVTVSWNSGALTSGVHTFPAVLQSSGLYSLSSVVTVPSSSL
GTQTYICNVNHKPSNTKVDKKVEPKSCDKTHTCPPCPAPEFEGGPSVFL
FPPKPKDTLMISRTPEVTCVVVDVSHEDPEVKFNWYVDGVEVHNAKTKP
REEQYNSTYRVVSVLTVLHQDWLNGKEYKCKVSNKALPASIEKTISKAK
GQPREPQVYTLPPCRDELTKNQVSLWCLVKGFYPSDIAVEWESNGQPEN
NYKTTPPVLDSDGSFFLYSKLTVDKSRWQQGNVFSCSVLHEALHSHYTQ
KSLSLSPGK

[0695] SEQ ID NO: 82 is the amino acid sequence defining the 4-20 derived light chain of the 2-17/4-20 antibody 4-20 LC

DIQMTQSPSSLSASVGDRVTITCRASQSISSYLNWYQQKPGKAPKLLIS
AASSLQSGVPSRFSGSGSGTDFTLTISSLQPEDFATYYCQQSYNTLQVT
FGGGTKVEIKRTVAAPSVFIFPPSDEQLKSGTASVVCLLNNFYPREAKV
QWKVDNALQSGNSQESVTEQDSKDSTYSLSSTLTLSKADYEKHKVYACE
VTHQGLSSPVTKSFNRGEC

[0696] The 5-24/1-57 bispecific antibody sequence can comprise:

[0697] SEQ ID NO: 83 is the amino acid sequence defining the 5-24 derived heavy chain of the 5-24/1-57 antibody 5-24HC-Hole-Cross

QVQLVESGGGVVQPGRSLRLSCAASGLTFSSYVMHWVRQAPGKGLDWVGV
IWYDGSKKYYADSVKGRFTISRDNSKNTLYLQMNSLRAEDTAVYYCARDP
RDYYDFWSGYDYYYGLDVWGQGTTVTVSSASTAAPSVFIFPPSDEQLKSG
TASVVCLLNNFYPREAKVQWKVDNALQSGNSQESVTEQDSKDSTYSLSST
LTLSKADYEKHKVYACEVTHQGLSSPVTKSFNRGECDKTHTCPPCPAPEF
EGGPSVFLFPPKPKDTLMISRTPEVTCVVVDVSHEDPEVKFNWYVDGVEV
HNAKTKPREEQYNSTYRVVSVLTVLHQDWLNGKEYKCKVSNKALPASIEK
TISKAKGQPREPQVCTLPPSRDELTKNQVSLSCAVKGFYPSDIAVEWESN
GQPENNYKTTPPVLDSDGSFFLVSKLTVDKSRWQQGNVFSCSVLHEALHS
HYTQKSLSLSPGK

[0698] SEQ ID NO: 84 is the amino acid sequence defining the 5-24 derived light chain of the 5-24/1-57 antibody 5-24VLCH1

EIVLTQSPGILSLSPGERATLSCRASQSVSSSYLAWYQQKPGQAPRLLIY
GASSRATGIPDRFSGSGSGTDFTLTISRLEPEDFAVYYCQQYGSSGALTF
GGGTKVEIKSSASTKGPSVFPLAPSSKSTSGGTAALGCLVKDYFPEPVTV
SWNSGALTSGVHTFPAVLQSSGLYSLSSVVTVPSSSLGTQTYICNVNHKP
SNTKVDKKVEPKSC

[0699] SEQ ID NO: 85 is the amino acid sequence defining the 1-57 derived heavy chain of the 5-24/1-57 antibody 1-57HC-Knob

EVHLVESGGGLVQPGGSLRLSCAASGFTFSDHYMDWVRQAPGKGLEWVGR
TRNKANSYTTEYAASVKGRFTISRDDAKNSLYLQMNSLKTEDTAVYYCAR
VHRWAYCINGVCFGAYSDYWGQGTLVTVSSASTKGPSVFPLAPSSKSTSG
GTAALGCLVKDYFPEPVTVSWNSGALTSGVHTFPAVLQSSGLYSLSSVVT
VPSSSLGTQTYICNVNHKPSNTKVDKKVEPKSCDKTHTCPPCPAPEFEGG
PSVFLFPPKPKDTLMISRTPEVTCVVVDVSHEDPEVKFNWYVDGVEVHNA
KTKPREEQYNSTYRVVSVLTVLHQDWLNGKEYKCKVSNKALPASIEKTIS
KAKGQPREPQVYTLPPCRDELTKNQVSLWCLVKGFYPSDIAVEWESNGQP
ENNYKTTPPVLDSDGSFFLYSKLTVDKSRWQQGNVFSCSVLHEALHSHYT
QKSLSLSPGK

[0700] SEQ ID NO: 86 is the amino acid sequence defining the 1-57 derived light chain of the 5-24/1-57 antibody 1-57LC

EIVLTQSPGTLSLSPGERATLSCRASQSVSSSYLAWYQQKPGQAPRLLIY
GASSRATGIPDRFSGSGSGTDFTLTISRLEPEDFAVYYCQQYGSSPSTFG
QGTKLEIKRTVAAPSVFIFPPSDEQLKSGTASVVCLLNNFYPREAKVQWK
VDNALQSGNSQESVTEQDSKDSTYSLSSTLTLSKADYEKHKVYACEVTHQ
GLSSPVTKSFNRGEC

[0701] The 5-24/2-15 bispecific antibody sequence can comprise:

[0702] SEQ ID NO: 87 is the amino acid sequence defining the 5-24 derived heavy chain of the 5-24/2-15 antibody 5-24HC-Hole-Cross

QVQLVESGGGVVQPGRSLRLSCAASGLTFSSYVMHWVRQAPGKGLDWVGV
IWYDGSKKYYADSVKGRFTISRDNSKNTLYLQMNSLRAEDTAVYYCARDP
RDYYDFWSGYDYYYGLDVWGQGTTVTVSSASTAAPSVFIFPPSDEQLKSG
TASVVCLLNNFYPREAKVQWKVDNALQSGNSQESVTEQDSKDSTYSLSST
LTLSKADYEKHKVYACEVTHQGLSSPVTKSFNRGECDKTHTCPPCPAPEF
EGGPSVFLFPPKPKDTLMISRTPEVTCVVVDVSHEDPEVKFNWYVDGVEV
HNAKTKPREEQYNSTYRVVSVLTVLHQDWLNGKEYKCKVSNKALPASIEK
TISKAKGQPREPQVCTLPPSRDELTKNQVSLSCAVKGFYPSDIAVEWESN
GQPENNYKTTPPVLDSDGSFFLVSKLTVDKSRWQQGNVFSCSVLHEALHS
HYTQKSLSLSPGK

[0703] SEQ ID NO: 88 is the amino acid sequence defining the 5-24 derived light chain of the 5-24/2-15 antibody 5-24VLCH1

EIVLTQSPGILSLSPGERATLSCRASQSVSSSYLAWYQQKPGQAPRLLIY
GASSRATGIPDRFSGSGSGTDFTLTISRLEPEDFAVYYCQQYGSSGALTF
GGGTKVEIKSSASTKGPSVFPLAPSSKSTSGGTAALGCLVKDYFPEPVTV
SWNSGALTSGVHTFPAVLQSSGLYSLSSVVTVPSSSLGTQTYICNVNHKP
SNTKVDKKVEPKSC

[0704] SEQ ID NO: 89 is the amino acid sequence defining the 2-15 derived heavy chain of the 5-24/2-15 antibody 2-15HC-Knob

QVQLVQSGAEVKKPGASVRVSCKASGYTFTGYYMHWVRQAPGQGLEWMGW
INPISDGTNYAQKFQGWVTMTRDTSISTVYMELSRLRSDDTAVYYCARGG
SRCSGGNCYGWAYDAFDIWGQGTMITVSSASTKGPSVFPLAPSSKSTSGG
TAALGCLVKDYFPEPVTVSWNSGALTSGVHTFPAVLQSSGLYSLSSVVTV
PSSSLGTQTYICNVNHKPSNTKVDKKVEPKSCDKTHTCPPCPAPEFEGGP
SVFLFPPKPKDTLMISRTPEVTCVVVDVSHEDPEVKFNWYVDGVEVHNAK
TKPREEQYNSTYRVVSVLTVLHQDWLNGKEYKCKVSNKALPASIEKTISK
AKGQPREPQVYTLPPCRDELTKNQVSLWCLVKGFYPSDIAVEWESNGQPE
NNYKTTPPVLDSDGSFFLYSKLTVDKSRWQQGNVFSCSVLHEALHSHYTQ
KSLSLSPGK

[0705] SEQ ID NO: 90 is the amino acid sequence defining the 2-15 derived light chain of the 5-24/2-15 antibody 2-15LC

QSALTQPASVSGSPGQSITISCTGTSSDVGGYNFVSWYQQHPGKAPKLMI
YDVSKRPSGVSNRFSGSKSGNTASLTISGLQAEDEADCYCSSYTSSSTFV
FGTGTKVTVLGQPKAAPSVTLFPPSSEELQANKATLVCLISDFYPGAVTV
AWKADSSPVKAGVETTTPSKQSNNKYAASSYLSLTPEQWKSHRSYSCQVT
HEGSTVEKTVAPTECS

[0706] The 5-24/4-20 bispecific antibody sequence can comprise:

[0707] SEQ ID NO: 91 is the amino acid sequence defining the 5-24 derived heavy chain of the 5-24/4-20 antibody 5-24HC-Hole-Cross

QVQLVESGGGVVQPGRSLRLSCAASGLTFSSYVMHWVRQAPGKGLDWVGV
IWYDGSKKYYADSVKGRFTISRDNSKNTLYLQMNSLRAEDTAVYYCARDP
RDYYDFWSGYDYYYGLDVWGQGTTVTVSSASTAAPSVFIFPPSDEQLKSG
TASVVCLLNNFYPREAKVQWKVDNALQSGNSQESVTEQDSKDSTYSLSST
LTLSKADYEKHKVYACEVTHQGLSSPVTKSFNRGECDKTHTCPPCPAPEF
EGGPSVFLFPPKPKDTLMISRTPEVTCVVVDVSHEDPEVKFNWYVDGVEV
HNAKTKPREEQYNSTYRVVSVLTVLHQDWLNGKEYKCKVSNKALPASIEK
TISKAKGQPREPQVCTLPPSRDELTKNQVSLSCAVKGFYPSDIAVEWESN
GQPENNYKTTPPVLDSDGSFFLVSKLTVDKSRWQQGNVFSCSVLHEALHS
HYTQKSLSLSPGK

[0708] SEQ ID NO: 92 is the amino acid sequence defining the 5-24 derived light chain of the 5-24/4-20 antibody 5-24VLCH1

EIVLTQSPGILSLSPGERATLSCRASQSVSSSYLAWYQQKPGQAPRLLIY
GASSRATGIPDRFSGSGSGTDFTLTISRLEPEDFAVYYCQQYGSSGALTF
GGGTKVEIKSSASTKGPSVFPLAPSSKSTSGGTAALGCLVKDYFPEPVTV
SWNSGALTSGVHTFPAVLQSSGLYSLSSVVTVPSSSLGTQTYICNVNHKP
SNTKVDKKVEPKSC

[0709] SEQ ID NO: 93 is the amino acid sequence defining the 4-20 derived heavy chain of the 5-24/4-20 antibody 4-20HC-Knob

QVQLLQSGAEVKKPGASVKVSCKASGYSFTSYYMHWVRQAPGQGLEWMGI
INPSGGGTTYAQKFQGRVTMTRDTSTSTVYMELSSLRSEDTAVYYCARPG
GGSYQEFDYWGQGTLVTVSSASTKGPSVFPLAPSSKSTSGGTAALGCLVK
DYFPEPVTVSWNSGALTSGVHTFPAVLQSSGLYSLSSVVTVPSSSLGTQT
YICNVNHKPSNTKVDKKVEPKSCDKTHTCPPCPAPEFEGGPSVFLFPPKP
KDTLMISRTPEVTCVVVDVSHEDPEVKFNWYVDGVEVHNAKTKPREEQYN
STYRVVSVLTVLHQDWLNGKEYKCKVSNKALPASIEKTISKAKGQPREPQ
VYTLPPCRDELTKNQVSLWCLVKGFYPSDIAVEWESNGQPENNYKTTPPV
LDSDGSFFLYSKLTVDKSRWQQGNVFSCSVLHEALHSHYTQKSLSLSPGK

[0710] SEQ ID NO: 94 is the amino acid sequence defining the 4-20 derived light chain of the 5-24/4-20 antibody 4-20LC

DIQMTQSPSSLSASVGDRVTITCRASQSISSYLNWYQQKPGKAPKLLISA
ASSLQSGVPSRFSGSGSGTDFTLTISSLQPEDFATYYCQQSYNTLQVTFG
GGTKVEIKRTVAAPSVFIFPPSDEQLKSGTASVVCLLNNFYPREAKVQWK
VDNALQSGNSQESVTEQDSKDSTYSLSSTLTLSKADYEKHKVYACEVTHQ
GLSSPVTKSFNRGEC

[0711] The 1-20/1-68 bispecific antibody sequence can comprise:

[0712] SEQ ID NO: 95 is the amino acid sequence defining the 1-20 derived heavy chain of the 1-20/1-68 antibody 1-20HC-Hole-Cross

EVQLVESGGGLIQPGGSLRLSCAASGLTVSSNYMSWVRQAPGKGLEWVSV
IYSGGSTFYADSVKGRFTISRDNSKNTLYLQMNSLRAEDTAVYYCARDLF
YYGMDVWGQGTTVTVSSASTAAPSVFIFPPSDEQLKSGTASVVCLLNNFY
PREAKVQWKVDNALQSGNSQESVTEQDSKDSTYSLSSTLTLSKADYEKHK
VYACEVTHQGLSSPVTKSFNRGECDKTHTCPPCPAPEFEGGPSVFLFPPK
PKDTLMISRTPEVTCVVVDVSHEDPEVKFNWYVDGVEVHNAKTKPREEQY
NSTYRVVSVLTVLHQDWLNGKEYKCKVSNKALPASIEKTISKAKGQPREP
QVCTLPPSRDELTKNQVSLSCAVKGFYPSDIAVEWESNGQPENNYKTTPP
VLDSDGSFFLVSKLTVDKSRWQQGNVFSCSVLHEALHSHYTQKSLSLSPG
K

[0713] SEQ ID NO: 96 is the amino acid sequence defining the 1-20 derived light chain of the 1-20/1-68 antibody 1-20VLCH1

DIQLTQSPSFLSASVGDRVTITCRASQGISSYLAWYQQKPGKAPKLLIYA
ASTLQSGVPSRFSGSGSGTEFTLTISSLQPEDFATYYCQQLNSYPCFGPG
TKVDIKSSASTKGPSVFPLAPSSKSTSGGTAALGCLVKDYFPEPVTVSWN
SGALTSGVHTFPAVLQSSGLYSLSSVVTVPSSSLGTQTYICNVNHKPSNT
KVDKKVEPKSC

[0714] SEQ ID NO: 97 is the amino acid sequence defining the 1-68 derived heavy chain of the 1-20/1-68 antibody 1-68HC-Knob

QVQLVQSGAEVKKPGASVKVSCKVSGYTLIELSMHWVRQAPGKGLEWMGG
FDPEDAETIYAQKFQGRVTMTEDTSTDTAYMELSSLRSEDTAVYYCATGW
AVAGSSDVWYYYYGMDVWGQGTTVTVSSASTKGPSVFPLAPSSKSTSGGT
AALGCLVKDYFPEPVTVSWNSGALTSGVHTFPAVLQSSGLYSLSSVVTVP
SSSLGTQTYICNVNHKPSNTKVDKKVEPKSCDKTHTCPPCPAPEFEGGPS
VFLFPPKPKDTLMISRTPEVTCVVVDVSHEDPEVKFNWYVDGVEVHNAKT
KPREEQYNSTYRVVSVLTVLHQDWLNGKEYKCKVSNKALPASIEKTISKA
KGQPREPQVYTLPPCRDELTKNQVSLWCLVKGFYPSDIAVEWESNGQPEN
NYKTTPPVLDSDGSFFLYSKLTVDKSRWQQGNVFSCSVLHEALHSHYTQK
SLSLSPGK

[0715] SEQ ID NO: 98 is the amino acid sequence defining the 1-68 derived light chain of the 1-20/1-68 antibody 1-68LC

QSALTQPPSVSGSPGQSVTISCTGTSSDVGSYNRVSWYQQPPGTAPKLMI
YEVSNRPSGVPDRFSGSKSGNTASLTISGLQAEDEADYYCSSYTSSSTYV
FGTGTKVTVLGQPKAAPSVTLFPPSSEELQANKATLVCLISDFYPGAVTV
AWKADSSPVKAGVETTTPSKQSNNKYAASSYLSLTPEQWKSHRSYSCQVT
HEGSTVEKTVAPTECS

[0716] The 1-20/2-17 bispecific antibody sequence can comprise:

[0717] SEQ ID NO: 99 is the amino acid sequence defining the 1-20 derived heavy chain of the 1-20/2-17 antibody 1-20HC-Hole-Cross

EVQLVESGGGLIQPGGSLRLSCAASGLTVSSNYMSWVRQAPGKGLEWVSV
IYSGGSTFYADSVKGRFTISRDNSKNTLYLQMNSLRAEDTAVYYCARDLF
YYGMDVWGQGTTVTVSSASTAAPSVFIFPPSDEQLKSGTASVVCLLNNFY
PREAKVQWKVDNALQSGNSQESVTEQDSKDSTYSLSSTLTLSKADYEKHK
VYACEVTHQGLSSPVTKSFNRGECDKTHTCPPCPAPEFEGGPSVFLFPPK
PKDTLMISRTPEVTCVVVDVSHEDPEVKFNWYVDGVEVHNAKTKPREEQY
NSTYRVVSVLTVLHQDWLNGKEYKCKVSNKALPASIEKTISKAKGQPREP
QVCTLPPSRDELTKNQVSLSCAVKGFYPSDIAVEWESNGQPENNYKTTPP
VLDSDGSFFLVSKLTVDKSRWQQGNVFSCSVLHEALHSHYTQKSLSLSPG
K

[0718] SEQ ID NO: 100 is the amino acid sequence defining the 1-20 derived light chain of the 1-20/2-17 antibody 1-20VLCH1

DIQLTQSPSFLSASVGDRVTITCRASQGISSYLAWYQQKPGKAPKLLIYA
ASTLQSGVPSRFSGSGSGTEFTLTISSLQPEDFATYYCQQLNSYPCFGPG
TKVDIKSSASTKGPSVFPLAPSSKSTSGGTAALGCLVKDYFPEPVTVSWN
SGALTSGVHTFPAVLQSSGLYSLSSVVTVPSSSLGTQTYICNVNHKPSNT
KVDKKVEPKSC

[0719] SEQ ID NO: 101 is the amino acid sequence defining the 2-17 derived heavy chain of the 1-20/2-17 antibody 2-17HC-Knob

QVQLVQSGAEVKKPGSSVKVSCKASGGTFSSYAISWVRQAPGQGLEWMGG
NIPIFGTANYAQKFQGRVTITADESTSTAYMELSSLRSEDTAVYYCARGV
GYRGVIPLNWFDPWGQGTVVTVSSASTKGPSVFPLAPSSKSTSGGTAALG
CLVKDYFPEPVTVSWNSGALTSGVHTFPAVLQSSGLYSLSSVVTVPSSSL
GTQTYICNVNHKPSNTKVDKKVEPKSCDKTHTCPPCPAPEFEGGPSVFLF
PPKPKDTLMISRTPEVTCVVVDVSHEDPEVKFNWYVDGVEVHNAKTKPRE
EQYNSTYRVVSVLTVLHQDWLNGKEYKCKVSNKALPASIEKTISKAKGQP
REPQVYTLPPCRDELTKNQVSLWCLVKGFYPSDIAVEWESNGQPENNYKT
TPPVLDSDGSFFLYSKLTVDKSRWQQGNVFSCSVLHEALHSHYTQKSLSL
SPGK

[0720] SEQ ID NO: 102 is the amino acid sequence defining the 2-17 derived light chain of the 1-20/2-17 antibody 2-17LC

EIVMTQSPATLSVSPGERATLSCRASQSVSSDLAWYQHKPGQAPRLLIYG
ASTRATGIPVRFSGSGSGTEFTLTISSLQSEDFAVYYCQQYNNWPPFTFG
GGTKVEIKRTVAAPSVFIFPPSDEQLKSGTASVVCLLNNFYPREAKVQWK
VDNALQSGNSQESVTEQDSKDSTYSLSSTLTLSKADYEKHKVYACEVTHQ
GLSSPVTKSFNRGEC

[0721] The 1-20/4-18 bispecific antibody sequence can comprise:

[0722] SEQ ID NO: 103 is the amino acid sequence defining the 1-20 derived heavy chain of the 1-20/4-18 antibody 1-20HC-Hole-Cross

EVQLVESGGGLIQPGGSLRLSCAASGLTVSSNYMSWVRQAPGKGLEWVSV
IYSGGSTFYADSVKGRFTISRDNSKNTLYLQMNSLRAEDTAVYYCARDLF
YYGMDVWGQGTTVTVSSASTAAPSVFIFPPSDEQLKSGTASVVCLLNNFY
PREAKVQWKVDNALQSGNSQESVTEQDSKDSTYSLSSTLTLSKADYEKHK
VYACEVTHQGLSSPVTKSFNRGECDKTHTCPPCPAPEFEGGPSVFLFPPK
PKDTLMISRTPEVTCVVVDVSHEDPEVKFNWYVDGVEVHNAKTKPREEQY
NSTYRVVSVLTVLHQDWLNGKEYKCKVSNKALPASIEKTISKAKGQPREP
QVCTLPPSRDELTKNQVSLSCAVKGFYPSDIAVEWESNGQPENNYKTTPP
VLDSDGSFFLVSKLTVDKSRWQQGNVFSCSVLHEALHSHYTQKSLSLSPG
K

[0723] SEQ ID NO: 104 is the amino acid sequence defining the 1-20 derived light chain of the 1-20/4-18 antibody 1-20VLCH1

DIQLTQSPSFLSASVGDRVTITCRASQGISSYLAWYQQKPGKAPKLLIYA
ASTLQSGVPSRFSGSGSGTEFTLTISSLQPEDFATYYCQQLNSYPCFGPG
TKVDIKSSASTKGPSVFPLAPSSKSTSGGTAALGCLVKDYFPEPVTVSWN
SGALTSGVHTFPAVLQSSGLYSLSSVVTVPSSSLGTQTYICNVNHKPSNT
KVDKKVEPKSC

[0724] SEQ ID NO: 105 is the amino acid sequence defining the 4-18 derived heavy chain of the 1-20/4-18 antibody 4-18HC-Knob

QVQLVESGGGVVQPGRSLRLSCAASGFTFSSYGMHWVRQAPGKGLEWVAV
ISYDGSNKHYADSVKGRFTISRDNSKNTLYLQMNSLRAEDTAVYYCAKDS
GYNYGYSWFDPWGQGTLVTVSSASTKGPSVFPLAPSSKSTSGGTAALGCL
VKDYFPEPVTVSWNSGALTSGVHTFPAVLQSSGLYSLSSVVTVPSSSLGT
QTYICNVNHKPSNTKVDKKVEPKSCDKTHTCPPCPAPEFEGGPSVFLFPP
KPKDTLMISRTPEVTCVVVDVSHEDPEVKFNWYVDGVEVHNAKTKPREEQ
YNSTYRVVSVLTVLHQDWLNGKEYKCKVSNKALPASIEKTISKAKGQPRE
PQVYTLPPCRDELTKNQVSLWCLVKGFYPSDIAVEWESNGQPENNYKTTP
PVLDSDGSFFLYSKLTVDKSRWQQGNVFSCSVLHEALHSHYTQKSLSLSP
GK

[0725] SEQ ID NO: 106 is the amino acid sequence defining the 4-18 derived light chain of the 1-20/4-18 antibody 4-18LC

SYELTQPPSVSVSPGQTARITCSADALAKQYAYWYQQKPGQAPVLVIYKD
SERPSGIPERFSGSSSGTTVTLTISGVQAEDEADYYCQSTDNSGTYPNWV
FGGGTKLTVLGQPKAAPSVTLFPPSSEELQANKATLVCLISDFYPGAVTV
AWKADSSPVKAGVETTTPSKQSNNKYAASSYLSLTPEQWKSHRSYSCQVT
HEGSTVEKTVAPTECS

[0726] The 1-20/5-24 bispecific antibody sequence can comprise:

[0727] SEQ ID NO: 107 is the amino acid sequence defining the 1-20 derived heavy chain of the 1-20/5-24 antibody 1-20HC-Hole-Cross

EVQLVESGGGLIQPGGSLRLSCAASGLTVSSNYMSWVRQAPGKGLEWVSV
IYSGGSTFYADSVKGRFTISRDNSKNTLYLQMNSLRAEDTAVYYCARDLF
YYGMDVWGQGTTVTVSSASTAAPSVFIFPPSDEQLKSGTASVVCLLNNFY
PREAKVQWKVDNALQSGNSQESVTEQDSKDSTYSLSSTLTLSKADYEKHK
VYACEVTHQGLSSPVTKSFNRGECDKTHTCPPCPAPEFEGGPSVFLFPPK
PKDTLMISRTPEVTCVVVDVSHEDPEVKFNWYVDGVEVHNAKTKPREEQY
NSTYRVVSVLTVLHQDWLNGKEYKCKVSNKALPASIEKTISKAKGQPREP
QVCTLPPSRDELTKNQVSLSCAVKGFYPSDIAVEWESNGQPENNYKTTPP
VLDSDGSFFLVSKLTVDKSRWQQGNVFSCSVLHEALHSHYTQKSLSLSPG
K

[0728] SEQ ID NO: 108 is the amino acid sequence defining the 1-20 derived light chain of the 1-20/5-24 antibody 1-20VLCH1

DIQLTQSPSFLSASVGDRVTITCRASQGISSYLAWYQQKPGKAPKLLIYA
ASTLQSGVPSRFSGSGSGTEFTLTISSLQPEDFATYYCQQLNSYPCFGPG
TKVDIKSSASTKGPSVFPLAPSSKSTSGGTAALGCLVKDYFPEPVTVSWN
SGALTSGVHTFPAVLQSSGLYSLSSVVTVPSSSLGTQTYICNVNHKPSNT
KVDKKVEPKSC

[0729] SEQ ID NO: 109 is the amino acid sequence defining the 5-24 derived heavy chain of the 1-20/5-24 antibody 5-24HC-Knob

QVQLVESGGGVVQPGRSLRLSCAASGLTFSSYVMHWVRQAPGKGLDWVGV
IWYDGSKKYYADSVKGRFTISRDNSKNTLYLQMNSLRAEDTAVYYCARDP
RDYYDFWSGYDYYYGLDVWGQGTTVTVSSASTKGPSVFPLAPSSKSTSGG
TAALGCLVKDYFPEPVTVSWNSGALTSGVHTFPAVLQSSGLYSLSSVVTV
PSSSLGTQTYICNVNHKPSNTKVDKKVEPKSCDKTHTCPPCPAPEFEGGP
SVFLFPPKPKDTLMISRTPEVTCVVVDVSHEDPEVKFNWYVDGVEVHNAK
TKPREEQYNSTYRVVSVLTVLHQDWLNGKEYKCKVSNKALPASIEKTISK
AKGQPREPQVYTLPPCRDELTKNQVSLWCLVKGFYPSDIAVEWESNGQPE
NNYKTTPPVLDSDGSFFLYSKLTVDKSRWQQGNVFSCSVLHEALHSHYTQ
KSLSLSPGK

[0730] SEQ ID NO: 110 is the amino acid sequence defining the 5-24 derived light chain of the 1-20/5-24 antibody 5-24LC

EIVLTQSPGILSLSPGERATLSCRASQSVSSSYLAWYQQKPGQAPRLLIY
GASSRATGIPDRFSGSGSGTDFTLTISRLEPEDFAVYYCQQYGSSGALTF
GGGTKVEIKRTVAAPSVFIFPPSDEQLKSGTASVVCLLNNFYPREAKVQW
KVDNALQSGNSQESVTEQDSKDSTYSLSSTLTLSKADYEKHKVYACEVTH
QGLSSPVTKSFNRGEC

[0731] Bispecific antibodies with both LALA (TM) and LS mutations:

[0732] The 2-7/4-8(39/51/57) bispecific antibody sequence can comprise:

[0733] SEQ ID NO: 111 is the amino acid sequence defining the 2-7 derived heavy chain of the 2-7/4-8(39/51/57) antibody 2-7HC-Hole-Cross

QITLKESGPTLVKPTQTLTLTCTFSGFSLSTSGVGVGWIRQPPGKALEWL
ALIYWDDDKRYSPSLKSRLTITKDTSKNQVVLTMTNMDPVDTATYYCAHH
KIERIFDYWGQGTLVTVSSASTAAPSVFIFPPSDEQLKSGTASVVCLLNN
FYPREAKVQWKVDNALQSGNSQESVTEQDSKDSTYSLSSTLTLSKADYEK
HKVYACEVTHQGLSSPVTKSFNRGECDKTHTCPPCPAPEFEGGPSVFLFP
PKPKDTLMISRTPEVTCVVVDVSHEDPEVKFNWYVDGVEVHNAKTKPREE
QYNSTYRVVSVLTVLHQDWLNGKEYKCKVSNKALPASIEKTISKAKGQPR
EPQVCTLPPSRDELTKNQVSLSCAVKGFYPSDIAVEWESNGQPENNYKTT
PPVLDSDGSFFLVSKLTVDKSRWQQGNVFSCSVLHEALHSHYTQKSLSLS
PGK

[0734] SEQ ID NO: 112 is the amino acid sequence defining the 2-7 derived light chain of the 2-7/4-8(39/51/57) antibody 2-7VLCH1

QSALAQPASVSGSPGQSITISCTGTSSDVGAYNYVSWYQQHPGKAPKLMI
YDVSKRPSGVSNRFSGSKSGNTASLTISGLQAEDEADYYCSSYTTSSTVF
GGGTKLTVLSSASTKGPSVFPLAPSSKSTSGGTAALGCLVKDYFPEPVTV
SWNSGALTSGVHTFPAVLQSSGLYSLSSVVTVPSSSLGTQTYICNVNHKP
SNTKVDKKVEPKSC

[0735] SEQ ID NO: 113 is the amino acid sequence defining the 4-8(39/51/57) derived heavy chain of the 2-7/4-8(39/51/57) antibody 4-8(39/51/57) HC-Knob

QVQLVQSGAEVKKAGSSVKVSCKASGGTFSSHTITWVRLAPGQGLEWMGR
NIPILGTANYAQKFQGRVTITADKSTSTAYMELSSLRSEDTAVYYCASLQ
TVDTAIEKYYGMDVWGQGTTVTVSSASTKGPSVFPLAPSSKSTSGGTAAL
GCLVKDYFPEPVTVSWNSGALTSGVHTFPAVLQSSGLYSLSSVVTVPSSS
LGTQTYICNVNHKPSNTKVDKKVEPKSCDKTHTCPPCPAPEFEGGPSVFL
FPPKPKDTLMISRTPEVTCVVVDVSHEDPEVKFNWYVDGVEVHNAKTKPR
EEQYNSTYRVVSVLTVLHQDWLNGKEYKCKVSNKALPASIEKTISKAKGQ
PREPQVYTLPPCRDELTKNQVSLWCLVKGFYPSDIAVEWESNGQPENNYK
TTPPVLDSDGSFFLYSKLTVDKSRWQQGNVFSCSVLHEALHSHYTQKSLS
LSPGK

[0736] SEQ ID NO: 114 is the amino acid sequence defining the 4-8(39/51/57) derived light chain of the 2-7/4-8(39/51/57) antibody 4-8LC

SYELTQPPSVSVSPGQTASITCSGDKLGDKYACWYQQKPGQSPVLVIYQD
NKRPSGIPERFSGSNSGNTATLTISGTQAMDEADYYCQAWDSSTAVFGGG
TKLTVLGQPKAAPSVTLFPPSSEELQANKATLVCLISDFYPGAVTVAWKA
DSSPVKAGVETTTPSKQSNNKYAASSYLSLTPEQWKSHRSYSCQVTHEGS
TVEKTVAPTECS

[0737] The 2-17/2-36 bispecific antibody sequence can comprise:

[0738] SEQ ID NO: 115 is the amino acid sequence defining the 2-17 derived heavy chain of the 2-17/2-36 antibody 2-17HC-Hole-Cross

QVQLVQSGAEVKKPGSSVKVSCKASGGTFSSYAISWVRQAPGQGLEWMGG
NIPIFGTANYAQKFQGRVTITADESTSTAYMELSSLRSEDTAVYYCARGV
GYRGVIPLNWFDPWGQGTVVTVSSASTAAPSVFIFPPSDEQLKSGTASVV
CLLNNFYPREAKVQWKVDNALQSGNSQESVTEQDSKDSTYSLSSTLTLSK
ADYEKHKVYACEVTHQGLSSPVTKSFNRGECDKTHTCPPCPAPEFEGGPS
VFLFPPKPKDTLMISRTPEVTCVVVDVSHEDPEVKFNWYVDGVEVHNAKT
KPREEQYNSTYRVVSVLTVLHQDWLNGKEYKCKVSNKALPASIEKTISKA
KGQPREPQVCTLPPSRDELTKNQVSLSCAVKGFYPSDIAVEWESNGQPEN
NYKTTPPVLDSDGSFFLVSKLTVDKSRWQQGNVFSCSVLHEALHSHYTQK
SLSLSPGK

[0739] SEQ ID NO: 116 is the amino acid sequence defining the 2-17 derived light chain of the 2-17/2-36 antibody 2-17VLCH1

EIVMTQSPATLSVSPGERATLSCRASQSVSSDLAWYQHKPGQAPRLLIYG
ASTRATGIPVRFSGSGSGTEFTLTISSLQSEDFAVYYCQQYNNWPPFTFG
GGTKVEIKSSASTKGPSVFPLAPSSKSTSGGTAALGCLVKDYFPEPVTVS
WNSGALTSGVHTFPAVLQSSGLYSLSSVVTVPSSSLGTQTYICNVNHKPS
NTKVDKKVEPKSC

[0740] SEQ ID NO: 117 is the amino acid sequence defining the 2-36 derived heavy chain of the 2-17/2-36 antibody 2-36HC-Knob

QVQLQESGPGLVKPSETLSLTCTVSGGSVSSSNYYWSWIRQPPGKGLEWI
GYMYYSGSTKYNPSLKSRVTISVDTSKNQFSLKLSSVTAADTAVYYCARE
VYYYDRSGYYASDGFDIWGQGTMVTVSSASTKGPSVFPLAPSSKSTSGGT
AALGCLVKDYFPEPVTVSWNSGALTSGVHTFPAVLQSSGLYSLSSVVTVP
SSSLGTQTYICNVNHKPSNTKVDKKVEPKSCDKTHTCPPCPAPEFEGGPS
VFLFPPKPKDTLMISRTPEVTCVVVDVSHEDPEVKFNWYVDGVEVHNAKT
KPREEQYNSTYRVVSVLTVLHQDWLNGKEYKCKVSNKALPASIEKTISKA
KGQPREPQVYTLPPCRDELTKNQVSLWCLVKGFYPSDIAVEWESNGQPEN
NYKTTPPVLDSDGSFFLYSKLTVDKSRWQQGNVFSCSVLHEALHSHYTQK
SLSLSPGK

[0741] SEQ ID NO: 118 is the amino acid sequence defining the 2-36 derived light chain of the 2-17/2-36 antibody 2-36LC

EIVLTQSPGTLSLSPGERATLSCRASQSVSSSYLAWYQQKPGQAPRLLIY
GASSRATGIPDRFSGSGSGTDFTLTISRLEPEDFAVYYCQQYGSSPQTFG
QGTKVEIKRTVAAPSVFIFPPSDEQLKSGTASVVCLLNNFYPREAKVQWK
VDNALQSGNSQESVTEQDSKDSTYSLSSTLTLSKADYEKHKVYACEVTHQ
GLSSPVTKSFNRGEC

[0742] The 2-36/1-68 bispecific antibody sequence can comprise:

[0743] SEQ ID NO: 119 is the amino acid sequence defining the 2-36 derived heavy chain of the 2-36/1-68 antibody 2-36HC-Hole-Cross

QVQLQESGPGLVKPSETLSLTCTVSGGSVSSSNYYWSWIRQPPGKGLEWI
GYMYYSGSTKYNPSLKSRVTISVDTSKNQFSLKLSSVTAADTAVYYCARE
VYYYDRSGYYASDGFDIWGQGTMVTVSSASTAAPSVFIFPPSDEQLKSGT
ASVVCLLNNFYPREAKVQWKVDNALQSGNSQESVTEQDSKDSTYSLSSTL
TLSKADYEKHKVYACEVTHQGLSSPVTKSFNRGECDKTHTCPPCPAPEFE
GGPSVFLFPPKPKDTLMISRTPEVTCVVVDVSHEDPEVKFNWYVDGVEVH
NAKTKPREEQYNSTYRVVSVLTVLHQDWLNGKEYKCKVSNKALPASIEKT
ISKAKGQPREPQVCTLPPSRDELTKNQVSLSCAVKGFYPSDIAVEWESNG
QPENNYKTTPPVLDSDGSFFLVSKLTVDKSRWQQGNVFSCSVLHEALHSH
YTQKSLSLSPGK

[0744] SEQ ID NO: 120 is the amino acid sequence defining the 2-36 derived light chain of the 2-36/1-68 antibody 2-36VLCH1

EIVLTQSPGTLSLSPGERATLSCRASQSVSSSYLAWYQQKPGQAPRLLIY
GASSRATGIPDRFSGSGSGTDFTLTISRLEPEDFAVYYCQQYGSSPQTFG
QGTKVEIKSSASTKGPSVFPLAPSSKSTSGGTAALGCLVKDYFPEPVTVS
WNSGALTSGVHTFPAVLQSSGLYSLSSVVTVPSSSLGTQTYICNVNHKPS
NTKVDKKVEPKSC

[0745] SEQ ID NO: 121 is the amino acid sequence defining the 1-68 derived heavy chain of the 2-36/1-68 antibody 1-68HC-Knob

QVQLVQSGAEVKKPGASVKVSCKVSGYTLIELSMHWVRQAPGKGLEWMGG
FDPEDAETIYAQKFQGRVTMTEDTSTDTAYMELSSLRSEDTAVYYCATGW
AVAGSSDVWYYYYGMDVWGQGTTVTVSSASTKGPSVFPLAPSSKSTSGGT
AALGCLVKDYFPEPVTVSWNSGALTSGVHTFPAVLQSSGLYSLSSVVTVP
SSSLGTQTYICNVNHKPSNTKVDKKVEPKSCDKTHTCPPCPAPEFEGGPS
VFLFPPKPKDTLMISRTPEVTCVVVDVSHEDPEVKFNWYVDGVEVHNAKT
KPREEQYNSTYRVVSVLTVLHQDWLNGKEYKCKVSNKALPASIEKTISKA
KGQPREPQVYTLPPCRDELTKNQVSLWCLVKGFYPSDIAVEWESNGQPEN
NYKTTPPVLDSDGSFFLYSKLTVDKSRWQQGNVFSCSVLHEALHSHYTQK
SLSLSPGK

[0746] SEQ ID NO: 122 is the amino acid sequence defining the 1-68 derived light chain of the 2-36/1-68 antibody 1-68LC

QSALTQPPSVSGSPGQSVTISCTGTSSDVGSYNRVSWYQQPPGTAPKLMI
YEVSNRPSGVPDRFSGSKSGNTASLTISGLQAEDEADYYCSSYTSSSTYV
FGTGTKVTVLGQPKAAPSVTLFPPSSEELQANKATLVCLISDFYPGAVTV
AWKADSSPVKAGVETTTPSKQSNNKYAASSYLSLTPEQWKSHRSYSCQVT
HEGSTVEKTVAPTECS

[0747] The 2-36/4-18 bispecific antibody sequence can comprise:

[0748] SEQ ID NO: 123 is the amino acid sequence defining the 2-36 derived heavy chain of the 2-36/4-18 antibody 2-36HC-Hole-Cross

QVQLQESGPGLVKPSETLSLTCTVSGGSVSSSNYYWSWIRQPPGKGLEWI
GYMYYSGSTKYNPSLKSRVTISVDTSKNQFSLKLSSVTAADTAVYYCARE
VYYYDRSGYYASDGFDIWGQGTMVTVSSASTAAPSVFIFPPSDEQLKSGT
ASVVCLLNNFYPREAKVQWKVDNALQSGNSQESVTEQDSKDSTYSLSSTL
TLSKADYEKHKVYACEVTHQGLSSPVTKSFNRGECDKTHTCPPCPAPEFE
GGPSVFLFPPKPKDTLMISRTPEVTCVVVDVSHEDPEVKFNWYVDGVEVH
NAKTKPREEQYNSTYRVVSVLTVLHQDWLNGKEYKCKVSNKALPASIEKT
ISKAKGQPREPQVCTLPPSRDELTKNQVSLSCAVKGFYPSDIAVEWESNG
QPENNYKTTPPVLDSDGSFFLVSKLTVDKSRWQQGNVFSCSVLHEALHSH
YTQKSLSLSPGK

[0749] SEQ ID NO: 124 is the amino acid sequence defining the 2-36 derived light chain of the 2-36/4-18 antibody 2-36VLCH1

EIVLTQSPGTLSLSPGERATLSCRASQSVSSSYLAWYQQKPGQAPRLLIY
GASSRATGIPDRFSGSGSGTDFTLTISRLEPEDFAVYYCQQYGSSPQTFG
QGTKVEIKSSASTKGPSVFPLAPSSKSTSGGTAALGCLVKDYFPEPVTVS
WNSGALTSGVHTFPAVLQSSGLYSLSSVVTVPSSSLGTQTYICNVNHKPS
NTKVDKKVEPKSC

[0750] SEQ ID NO: 125 is the amino acid sequence defining the 4-18 derived heavy chain of the 2-36/4-18 antibody 4-18HC-Knob

QVQLVESGGGVVQPGRSLRLSCAASGFTFSSYGMHWVRQAPGKGLEWVAV
ISYDGSNKHYADSVKGRFTISRDNSKNTLYLQMNSLRAEDTAVYYCAKDS
GYNYGYSWFDPWGQGTLVTVSSASTKGPSVFPLAPSSKSTSGGTAALGCL
VKDYFPEPVTVSWNSGALTSGVHTFPAVLQSSGLYSLSSVVTVPSSSLGT
QTYICNVNHKPSNTKVDKKVEPKSCDKTHTCPPCPAPEFEGGPSVFLFPP
KPKDTLMISRTPEVTCVVVDVSHEDPEVKFNWYVDGVEVHNAKTKPREEQ
YNSTYRVVSVLTVLHQDWLNGKEYKCKVSNKALPASIEKTISKAKGQPRE
PQVYTLPPCRDELTKNQVSLWCLVKGFYPSDIAVEWESNGQPENNYKTTP
PVLDSDGSFFLYSKLTVDKSRWQQGNVFSCSVLHEALHSHYTQKSLSLSP
GK

[0751] SEQ ID NO: 126 is the amino acid sequence defining the 4-18 derived light chain of the 2-36/4-18 antibody 4-18LC

SYELTQPPSVSVSPGQTARITCSADALAKQYAYWYQQKPGQAPVLVIYKD
SERPSGIPERFSGSSSGTTVTLTISGVQAEDEADYYCQSTDNSGTYPNWV
FGGGTKLTVLGQPKAAPSVTLFPPSSEELQANKATLVCLISDFYPGAVTV
AWKADSSPVKAGVETTTPSKQSNNKYAASSYLSLTPEQWKSHRSYSCQVT
HEGSTVEKTVAPTECS

[0752] The 2-30/1-68 bispecific antibody sequence can comprise:

[0753] SEQ ID NO: 127 is the amino acid sequence defining the 2-30 derived heavy chain of the 2-30/1-68 antibody 2-30HC-Hole-Cross

QVQLVESGGGVVQPGRSLRLSCAASGFTFSSYTMHWVRQAPGKGLEWVAA
ISYDGNNKYYADSVKGRFTISRDNSKNTLYLQMNSLRAEDTAVYYCARSI
LYGGGMDVWGQGTTVTVSSASTAAPSVFIFPPSDEQLKSGTASVVCLLNN
FYPREAKVQWKVDNALQSGNSQESVTEQDSKDSTYSLSSTLTLSKADYEK
HKVYACEVTHQGLSSPVTKSFNRGECDKTHTCPPCPAPEFEGGPSVFLFP
PKPKDTLMISRTPEVTCVVVDVSHEDPEVKFNWYVDGVEVHNAKTKPREE
QYNSTYRVVSVLTVLHQDWLNGKEYKCKVSNKALPASIEKTISKAKGQPR
EPQVCTLPPSRDELTKNQVSLSCAVKGFYPSDIAVEWESNGQPENNYKTT
PPVLDSDGSFFLVSKLTVDKSRWQQGNVFSCSVLHEALHSHYTQKSLSLS
PGK

[0754] SEQ ID NO: 128 is the amino acid sequence defining the 2-30 derived light chain of the 2-30/1-68 antibody 2-30VLCH1

DIQLTQSPSSLSASVGDRVTITCRASQGISSYLAWYQQKPGQAPKLLIYA
ASTLQSGVPSRFSGSGSGTDFTLTISSLQPEDFATYYCQQLNSYPLTFGG
GTKVEIKSSASTKGPSVFPLAPSSKSTSGGTAALGCLVKDYFPEPVTVSW
NSGALTSGVHTFPAVLQSSGLYSLSSVVTVPSSSLGTQTYICNVNHKPSN
TKVDKKVEPKSC

[0755] SEQ ID NO: 129 is the amino acid sequence defining the 1-68 derived heavy chain of the 2-30/1-68 antibody 1-68HC-Knob

QVQLVQSGAEVKKPGASVKVSCKVSGYTLIELSMHWVRQAPGKGLEWMGG
FDPEDAETIYAQKFQGRVTMTEDTSTDTAYMELSSLRSEDTAVYYCATGW
AVAGSSDVWYYYYGMDVWGQGTTVTVSSASTKGPSVFPLAPSSKSTSGGT
AALGCLVKDYFPEPVTVSWNSGALTSGVHTFPAVLQSSGLYSLSSVVTVP
SSSLGTQTYICNVNHKPSNTKVDKKVEPKSCDKTHTCPPCPAPEFEGGPS
VFLFPPKPKDTLMISRTPEVTCVVVDVSHEDPEVKFNWYVDGVEVHNAKT
KPREEQYNSTYRVVSVLTVLHQDWLNGKEYKCKVSNKALPASIEKTISKA
KGQPREPQVYTLPPCRDELTKNQVSLWCLVKGFYPSDIAVEWESNGQPEN
NYKTTPPVLDSDGSFFLYSKLTVDKSRWQQGNVFSCSVLHEALHSHYTQK
SLSLSPGK

[0756] SEQ ID NO: 130 is the amino acid sequence defining the 1-68 derived light chain of the 2-30/1-68 antibody 1-68LC

QSALTQPPSVSGSPGQSVTISCTGTSSDVGSYNRVSWYQQPPGTAPKLMI
YEVSNRPSGVPDRFSGSKSGNTASLTISGLQAEDEADYYCSSYTSSSTYV
FGTGTKVTVLGQPKAAPSVTLFPPSSEELQANKATLVCLISDFYPGAVTV
AWKADSSPVKAGVETTTPSKQSNNKYAASSYLSLTPEQWKSHRSYSCQVT
HEGSTVEKTVAPTECS

[0757] The 2-30/4-18 bispecific antibody can comprise:

[0758] SEQ ID NO: 131 is the amino acid sequence defining the 2-30 derived heavy chain of the 2-30/4-18 antibody 2-30HC-Hole-Cross

QVQLVESGGGVVQPGRSLRLSCAASGFTFSSYTMHWVRQAPGKGLEWVAA
ISYDGNNKYYADSVKGRFTISRDNSKNTLYLQMNSLRAEDTAVYYCARSI
LYGGGMDVWGQGTTVTVSSASTAAPSVFIFPPSDEQLKSGTASVVCLLNN
FYPREAKVQWKVDNALQSGNSQESVTEQDSKDSTYSLSSTLTLSKADYEK
HKVYACEVTHQGLSSPVTKSFNRGECDKTHTCPPCPAPEFEGGPSVFLFP
PKPKDTLMISRTPEVTCVVVDVSHEDPEVKFNWYVDGVEVHNAKTKPREE
QYNSTYRVVSVLTVLHQDWLNGKEYKCKVSNKALPASIEKTISKAKGQPR
EPQVCTLPPSRDELTKNQVSLSCAVKGFYPSDIAVEWESNGQPENNYKTT
PPVLDSDGSFFLVSKLTVDKSRWQQGNVFSCSVLHEALHSHYTQKSLSLS
PGK

[0759] SEQ ID NO: 132 is the amino acid sequence defining the 2-30 derived light chain of the 2-30/4-18 antibody 2-30VLCH1

DIQLTQSPSSLSASVGDRVTITCRASQGISSYLAWYQQKPGQAPKLLIYA
ASTLQSGVPSRFSGSGSGTDFTLTISSLQPEDFATYYCQQLNSYPLTFGG
GTKVEIKSSASTKGPSVFPLAPSSKSTSGGTAALGCLVKDYFPEPVTVSW
NSGALTSGVHTFPAVLQSSGLYSLSSVVTVPSSSLGTQTYICNVNHKPSN
TKVDKKVEPKSC

[0760] SEQ ID NO: 133 is the amino acid sequence defining the 4-18 derived heavy chain of the 2-30/4-18 antibody 4-18HC-Knob

QVQLVESGGGVVQPGRSLRLSCAASGFTFSSYGMHWVRQAPGKGLEWVAV
ISYDGSNKHYADSVKGRFTISRDNSKNTLYLQMNSLRAEDTAVYYCAKDS
GYNYGYSWFDPWGQGTLVTVSSASTKGPSVFPLAPSSKSTSGGTAALGCL
VKDYFPEPVTVSWNSGALTSGVHTFPAVLQSSGLYSLSSVVTVPSSSLGT
QTYICNVNHKPSNTKVDKKVEPKSCDKTHTCPPCPAPEFEGGPSVFLFPP
KPKDTLMISRTPEVTCVVVDVSHEDPEVKFNWYVDGVEVHNAKTKPREEQ
YNSTYRVVSVLTVLHQDWLNGKEYKCKVSNKALPASIEKTISKAKGQPRE
PQVYTLPPCRDELTKNQVSLWCLVKGFYPSDIAVEWESNGQPENNYKTTP
PVLDSDGSFFLYSKLTVDKSRWQQGNVFSCSVLHEALHSHYTQKSLSLSP
GK

[0761] SEQ ID NO: 134 is the amino acid sequence defining the 4-18 derived light chain of the 2-30/4-18 antibody 4-18LC

SYELTQPPSVSVSPGQTARITCSADALAKQYAYWYQQKPGQAPVLVIYKD
SERPSGIPERFSGSSSGTTVTLTISGVQAEDEADYYCQSTDNSGTYPNWV
FGGGTKLTVLGQPKAAPSVTLFPPSSEELQANKATLVCLISDFYPGAVTV
AWKADSSPVKAGVETTTPSKQSNNKYAASSYLSLTPEQWKSHRSYSCQVT
HEGSTVEKTVAPTECS

[0762] The 2-7/4-8(39/51) bispecific antibody sequence can comprise:

[0763] SEQ ID NO: 135 is the amino acid sequence defining the 2-7 derived heavy chain of the 2-7/4-8(39/51) antibody 2-7HC-Hole-Cross

QITLKESGPTLVKPTQTLTLTCTFSGFSLSTSGVGVGWIRQPPGKALEWL
ALIYWDDDKRYSPSLKSRLTITKDTSKNQVVLTMTNMDPVDTATYYCAHH
KIERIFDYWGQGTLVTVSSASTAAPSVFIFPPSDEQLKSGTASVVCLLNN
FYPREAKVQWKVDNALQSGNSQESVTEQDSKDSTYSLSSTLTLSKADYEK
HKVYACEVTHQGLSSPVTKSFNRGECDKTHTCPPCPAPEFEGGPSVFLFP
PKPKDTLMISRTPEVTCVVVDVSHEDPEVKFNWYVDGVEVHNAKTKPREE
QYNSTYRVVSVLTVLHQDWLNGKEYKCKVSNKALPASIEKTISKAKGQPR
EPQVCTLPPSRDELTKNQVSLSCAVKGFYPSDIAVEWESNGQPENNYKTT
PPVLDSDGSFFLVSKLTVDKSRWQQGNVFSCSVLHEALHSHYTQKSLSLS
PGK

[0764] SEQ ID NO: 136 is the amino acid sequence defining the 2-7 derived light chain of the 2-7/4-8(39/51) antibody 2-7VLCH1

QSALAQPASVSGSPGQSITISCTGTSSDVGAYNYVSWYQQHPGKAPKLMI
YDVSKRPSGVSNRFSGSKSGNTASLTISGLQAEDEADYYCSSYTTSSTVF
GGGTKLTVLSSASTKGPSVFPLAPSSKSTSGGTAALGCLVKDYFPEPVTV
SWNSGALTSGVHTFPAVLQSSGLYSLSSVVTVPSSSLGTQTYICNVNHKP
SNTKVDKKVEPKSC

[0765] SEQ ID NO: 137 is the amino acid sequence defining the 4-8(39/51) derived heavy chain of the 2-7/4-8(39/51) antibody 4-8(39/51) HC-Knob

QVQLVQSGAEVKKAGSSVKVSCKASGGTFSSHTITWVRLAPGQGLEWMGR
NIPILGIANYAQKFQGRVTITADKSTSTAYMELSSLRSEDTAVYYCASLQ
TVDTAIEKYYGMDVWGQGTTVTVSSASTKGPSVFPLAPSSKSTSGGTAAL
GCLVKDYFPEPVTVSWNSGALTSGVHTFPAVLQSSGLYSLSSVVTVPSSS
LGTQTYICNVNHKPSNTKVDKKVEPKSCDKTHTCPPCPAPEFEGGPSVFL
FPPKPKDTLMISRTPEVTCVVVDVSHEDPEVKFNWYVDGVEVHNAKTKPR
EEQYNSTYRVVSVLTVLHQDWLNGKEYKCKVSNKALPASIEKTISKAKGQ
PREPQVYTLPPCRDELTKNQVSLWCLVKGFYPSDIAVEWESNGQPENNYK
TTPPVLDSDGSFFLYSKLTVDKSRWQQGNVFSCSVLHEALHSHYTQKSLS
LSPGK

[0766] SEQ ID NO: 138 is the amino acid sequence defining the 4-8(39/51) derived light chain of the 2-7/4-8(39/51) antibody 4-8LC

SYELTQPPSVSVSPGQTASITCSGDKLGDKYACWYQQKPGQSPVLVIYQD
NKRPSGIPERFSGSNSGNTATLTISGTQAMDEADYYCQAWDSSTAVFGGG
TKLTVLGQPKAAPSVTLFPPSSEELQANKATLVCLISDFYPGAVTVAWKA
DSSPVKAGVETTTPSKQSNNKYAASSYLSLTPEQWKSHRSYSCQVTHEGS
TVEKTVAPTECS

[0767] The 1-57/1-87 bispecific antibody sequence can comprise:

[0768] SEQ ID NO: 139 is the amino acid sequence defining the 1-57 derived heavy chain of the 1-57/1-87 antibody 1-57HC-Hole-Cross

EVHLVESGGGLVQPGGSLRLSCAASGFTFSDHYMDWVRQAPGKGLEWVGR
TRNKANSYTTEYAASVKGRFTISRDDAKNSLYLQMNSLKTEDTAVYYCAR
VHRWAYCINGVCFGAYSDYWGQGTLVTVSSASTAAPSVFIFPPSDEQLKS
GTASVVCLLNNFYPREAKVQWKVDNALQSGNSQESVTEQDSKDSTYSLSS
TLTLSKADYEKHKVYACEVTHQGLSSPVTKSFNRGECDKTHTCPPCPAPE
FEGGPSVFLFPPKPKDTLMISRTPEVTCVVVDVSHEDPEVKFNWYVDGVE
VHNAKTKPREEQYNSTYRVVSVLTVLHQDWLNGKEYKCKVSNKALPASIE
KTISKAKGQPREPQVCTLPPSRDELTKNQVSLSCAVKGFYPSDIAVEWES
NGQPENNYKTTPPVLDSDGSFFLVSKLTVDKSRWQQGNVFSCSVLHEALH
SHYTQKSLSLSPGK

[0769] SEQ ID NO: 140 amino acid sequence defining the 1-57 derived light chain of the 1-57/1-87 antibody 1-57VLCH1

EIVLTQSPGTLSLSPGERATLSCRASQSVSSSYLAWYQQKPGQAPRLLIY
GASSRATGIPDRFSGSGSGTDFTLTISRLEPEDFAVYYCQQYGSSPSTFG
QGTKLEIKSSASTKGPSVFPLAPSSKSTSGGTAALGCLVKDYFPEPVTVS
WNSGALTSGVHTFPAVLQSSGLYSLSSVVTVPSSSLGTQTYICNVNHKPS
NTKVDKKVEPKSC

[0770] SEQ ID NO: 141 is the amino acid sequence defining the 1-87 derived heavy chain of the 1-57/1-87 antibody 1-87HC-Knob

QVQLVQSGAEVKKPGASVKVSCKVSGYTLIELSMHWVRQAPGKGLEWMGG
FDPEDAETIYAQKFQGRVTMTEDTSTDTAYMELSSLRSEDTAVYYCATGI
AVIGPPPSTYYYYGMDVWGQGTTVTVSSASTKGPSVFPLAPSSKSTSGGT
AALGCLVKDYFPEPVTVSWNSGALTSGVHTFPAVLQSSGLYSLSSVVTVP
SSSLGTQTYICNVNHKPSNTKVDKKVEPKSCDKTHTCPPCPAPEFEGGPS
VFLFPPKPKDTLMISRTPEVTCVVVDVSHEDPEVKFNWYVDGVEVHNAKT
KPREEQYNSTYRVVSVLTVLHQDWLNGKEYKCKVSNKALPASIEKTISKA
KGQPREPQVYTLPPCRDELTKNQVSLWCLVKGFYPSDIAVEWESNGQPEN
NYKTTPPVLDSDGSFFLYSKLTVDKSRWQQGNVFSCSVLHEALHSHYTQK
SLSLSPGK

[0771] SEQ ID NO: 142 is the amino acid sequence defining the 1-87 derived light chain of the 1-57/1-87 antibody 1-87LC

QSALTQPASVSGSPGQSITISCTGTSSDVGGYNYVSWYQQHPGKAPKLMI
YDVSKRPSGVSNRFSGSKSGNTASLTISGLQAEDEADYYCSSYTSSSTYV
FGTGTKVTVLGQPKAAPSVTLFPPSSEELQANKATLVCLISDFYPGAVTV
AWKADSSPVKAGVETTTPSKQSNNKYAASSYLSLTPEQWKSHRSYSCQVT
HEGSTVEKTVAPTECS

[0772] The 1-57/4-8(39/51) bispecific antibody can comprise:

[0773] SEQ ID NO: 143 is the amino acid sequence defining the 1-57 derived heavy chain of the 1-57/4-8(39/51) antibody 1-57HC-Hole-Cross

EVHLVESGGGLVQPGGSLRLSCAASGFTFSDHYMDWVRQAPGKGLEWVGR
TRNKANSYTTEYAASVKGRFTISRDDAKNSLYLQMNSLKTEDTAVYYCAR
VHRWAYCINGVCFGAYSDYWGQGTLVTVSSASTAAPSVFIFPPSDEQLKS
GTASVVCLLNNFYPREAKVQWKVDNALQSGNSQESVTEQDSKDSTYSLSS
TLTLSKADYEKHKVYACEVTHQGLSSPVTKSFNRGECDKTHTCPPCPAPE
FEGGPSVFLFPPKPKDTLMISRTPEVTCVVVDVSHEDPEVKFNWYVDGVE
VHNAKTKPREEQYNSTYRVVSVLTVLHQDWLNGKEYKCKVSNKALPASIE
KTISKAKGQPREPQVCTLPPSRDELTKNQVSLSCAVKGFYPSDIAVEWES
NGQPENNYKTTPPVLDSDGSFFLVSKLTVDKSRWQQGNVFSCSVLHEALH
SHYTQKSLSLSPGK

[0774] SEQ ID NO: 144 is the amino acid sequence defining the 1-57 derived light chain of the 1-57/4-8(39/51) antibody 1-57VLCH1

EIVLTQSPGTLSLSPGERATLSCRASQSVSSSYLAWYQQKPGQAPRLLIY
GASSRATGIPDRFSGSGSGTDFTLTISRLEPEDFAVYYCQQYGSSPSTFG
QGTKLEIKSSASTKGPSVFPLAPSSKSTSGGTAALGCLVKDYFPEPVTVS
WNSGALTSGVHTFPAVLQSSGLYSLSSVVTVPSSSLGTQTYICNVNHKPS
NTKVDKKVEPKSC

[0775] SEQ ID NO: 145 is the amino acid sequence defining the 4-8(39/51) derived heavy chain of the 1-57/4-8(39/51) antibody 4-8(39/51) HC-Knob

QVQLVQSGAEVKKAGSSVKVSCKASGGTFSSHTITWVRLAPGQGLEWMG
RNIPILGIANYAQKFQGRVTITADKSTSTAYMELSSLRSEDTAVYYCAS
LQTVDTAIEKYYGMDVWGQGTTVTVSSASTKGPSVFPLAPSSKSTSGGT
AALGCLVKDYFPEPVTVSWNSGALTSGVHTFPAVLQSSGLYSLSSVVTV
PSSSLGTQTYICNVNHKPSNTKVDKKVEPKSCDKTHTCPPCPAPEFEGG
PSVFLFPPKPKDTLMISRTPEVTCVVVDVSHEDPEVKFNWYVDGVEVHN
AKTKPREEQYNSTYRVVSVLTVLHQDWLNGKEYKCKVSNKALPASIEKT
ISKAKGQPREPQVYTLPPCRDELTKNQVSLWCLVKGFYPSDIAVEWESN
GQPENNYKTTPPVLDSDGSFFLYSKLTVDKSRWQQGNVFSCSVLHEALH
SHYTQKSLSLSPGK

[0776] SEQ ID NO: 146 is the amino acid sequence defining the 4-8(39/51) derived light chain of the 1-57/4-8(39/51) antibody 4-8(39/51)LC

SYELTQPPSVSVSPGQTASITCSGDKLGDKYACWYQQKPGQSPVLVIYQD
NKRPSGIPERFSGSNSGNTATLTISGTQAMDEADYYCQAWDSSTAVFGGG
TKLTVLGQPKAAPSVTLFPPSSEELQANKATLVCLISDFYPGAVTVAWKA
DSSPVKAGVETTTPSKQSNNKYAASSYLSLTPEQWKSHRSYSCQVTHEGS
TVEKTVAPTECS

[0777] The 2-7/2-51 bispecific antibody:

[0778] SEQ ID NO: 147 is the amino acid sequence defining the 2-7 derived heavy chain of the 2-7/2-51 antibody 2-7HC-Hole-Cross

QITLKESGPTLVKPTQTLTLTCTFSGFSLSTSGVGVGWIRQPPGKALEWL
ALIYWDDDKRYSPSLKSRLTITKDTSKNQVVLTMTNMDPVDTATYYCAHH
KIERIFDYWGQGTLVTVSSASTAAPSVFIFPPSDEQLKSGTASVVCLLNN
FYPREAKVQWKVDNALQSGNSQESVTEQDSKDSTYSLSSTLTLSKADYEK
HKVYACEVTHQGLSSPVTKSFNRGECDKTHTCPPCPAPEFEGGPSVFLFP
PKPKDTLMISRTPEVTCVVVDVSHEDPEVKFNWYVDGVEVHNAKTKPREE
QYNSTYRVVSVLTVLHQDWLNGKEYKCKVSNKALPASIEKTISKAKGQPR
EPQVCTLPPSRDELTKNQVSLSCAVKGFYPSDIAVEWESNGQPENNYKTT
PPVLDSDGSFFLVSKLTVDKSRWQQGNVFSCSVLHEALHSHYTQKSLSLS
PGK

[0779] SEQ ID NO: 148 is the amino acid sequence defining the 2-7 derived light chain of the 2-7/2-51 antibody 2-7VLCH1

QSALAQPASVSGSPGQSITISCTGTSSDVGAYNYVSWYQQHPGKAPKLMI
YDVSKRPSGVSNRFSGSKSGNTASLTISGLQAEDEADYYCSSYTTSSTVF
GGGTKLTVLSSASTKGPSVFPLAPSSKSTSGGTAALGCLVKDYFPEPVTV
SWNSGALTSGVHTFPAVLQSSGLYSLSSVVTVPSSSLGTQTYICNVNHKP
SNTKVDKKVEPKSC

[0780] SEQ ID NO: 149 is the amino acid sequence defining the 2-51 derived heavy chain of the 2-7/2-51 antibody 2-51 HC-Knob

QVQLVQSGAEVKKPGASVKVSCKVSGYTLIELSMHWVRQAPGKGLEWMGG
FDPEDVETIYAQQFQGRVTMTEDTSTDTAYMELSSLRSEDTAVYYCATGW
AYKSTWYFGYWGQGTLVTVSSASTKGPSVFPLAPSSKSTSGGTAALGCLV
KDYFPEPVTVSWNSGALTSGVHTFPAVLQSSGLYSLSSVVTVPSSSLGTQ
TYICNVNHKPSNTKVDKKVEPKSCDKTHTCPPCPAPEFEGGPSVFLFPPK
PKDTLMISRTPEVTCVVVDVSHEDPEVKFNWYVDGVEVHNAKTKPREEQY
NSTYRVVSVLTVLHQDWLNGKEYKCKVSNKALPASIEKTISKAKGQPREP
QVYTLPPCRDELTKNQVSLWCLVKGFYPSDIAVEWESNGQPENNYKTTPP
VLDSDGSFFLYSKLTVDKSRWQQGNVFSCSVLHEALHSHYTQKSLSLSPG
K

[0781] SEQ ID NO: 150 is the amino acid sequence defining the 2-51 derived light chain of the 2-7/2-51 antibody 2-51LC

QSALTQPPSASGSPGQSVTISCTGTSSDVGGYNYVSWYQQHPGKAPKLMI
YEVSKRPSGVPDRFSGSKSGNTASLTVSGLQAEDEADYYCSSYAGSRMGF
GGGTKLTVLGQPKAAPSVTLFPPSSEELQANKATLVCLISDFYPGAVTVA
WKADSSPVKAGVETTTPSKQSNNKYAASSYLSLTPEQWKSHRSYSCQVTH
EGSTVEKTVAPTECS

[0782] The 2-15/4-8(39/51) bispecific antibody sequence can comprise:

[0783] SEQ ID NO: 151 is the amino acid sequence defining the 2-15 derived heavy chain of the 2-15/4-8(39/51) antibody 2-15HC-Hole-Cross

QVQLVQSGAEVKKPGASVRVSCKASGYTFTGYYMHWVRQAPGQGLEWMGW
INPISDGTNYAQKFQGWVTMTRDTSISTVYMELSRLRSDDTAVYYCARGG
SRCSGGNCYGWAYDAFDIWGQGTMITVSSASTAAPSVFIFPPSDEQLKSG
TASVVCLLNNFYPREAKVQWKVDNALQSGNSQESVTEQDSKDSTYSLSST
LTLSKADYEKHKVYACEVTHQGLSSPVTKSFNRGECDKTHTCPPCPAPEF
EGGPSVFLFPPKPKDTLMISRTPEVTCVVVDVSHEDPEVKFNWYVDGVEV
HNAKTKPREEQYNSTYRVVSVLTVLHQDWLNGKEYKCKVSNKALPASIEK
TISKAKGQPREPQVCTLPPSRDELTKNQVSLSCAVKGFYPSDIAVEWESN
GQPENNYKTTPPVLDSDGSFFLVSKLTVDKSRWQQGNVFSCSVLHEALHS
HYTQKSLSLSPGK

[0784] SEQ ID NO: 152 is the amino acid sequence defining the 2-15 derived light chain of the 2-15/4-8(39/51) antibody 2-15VLCH1

QSALTQPASVSGSPGQSITISCTGTSSDVGGYNFVSWYQQHPGKAPKLMI
YDVSKRPSGVSNRFSGSKSGNTASLTISGLQAEDEADCYCSSYTSSSTFV
FGTGTKVTVLSSASTKGPSVFPLAPSSKSTSGGTAALGCLVKDYFPEPVT
VSWNSGALTSGVHTFPAVLQSSGLYSLSSVVTVPSSSLGTQTYICNVNHK
PSNTKVDKKVEPKSC

[0785] SEQ ID NO: 153 is the amino acid sequence defining the 4-8(39/51) derived heavy chain of the 2-15/4-8(39/51) antibody 4-8(39/51) HC-Knob

QVQLVQSGAEVKKAGSSVKVSCKASGGTFSSHTITWVRLAPGQGLEWMGR
NIPILGIANYAQKFQGRVTITADKSTSTAYMELSSLRSEDTAVYYCASLQ
TVDTAIEKYYGMDVWGQGTTVTVSSASTKGPSVFPLAPSSKSTSGGTAAL
GCLVKDYFPEPVTVSWNSGALTSGVHTFPAVLQSSGLYSLSSVVTVPSSS
LGTQTYICNVNHKPSNTKVDKKVEPKSCDKTHTCPPCPAPEFEGGPSVFL
FPPKPKDTLMISRTPEVTCVVVDVSHEDPEVKFNWYVDGVEVHNAKTKPR
EEQYNSTYRVVSVLTVLHQDWLNGKEYKCKVSNKALPASIEKTISKAKGQ
PREPQVYTLPPCRDELTKNQVSLWCLVKGFYPSDIAVEWESNGQPENNYK
TTPPVLDSDGSFFLYSKLTVDKSRWQQGNVFSCSVLHEALHSHYTQKSLS
LSPGK

[0786] SEQ ID NO: 154 is the amino acid sequence defining the 4-8(39/51) derived light chain of the 2-15/4-8(39/51) antibody 4-8(39/51)LC

SYELTQPPSVSVSPGQTASITCSGDKLGDKYACWYQQKPGQSPVLVIYQD
NKRPSGIPERFSGSNSGNTATLTISGTQAMDEADYYCQAWDSSTAVFGGG
TKLTVLGQPKAAPSVTLFPPSSEELQANKATLVCLISDFYPGAVTVAWKA
DSSPVKAGVETTTPSKQSNNKYAASSYLSLTPEQWKSHRSYSCQVTHEGS
TVEKTVAPTECS

[0787] The 1-57/4-18 bispecific antibody sequence can comprise:

[0788] SEQ ID NO: 155 is the amino acid sequence defining the 1-57 derived heavy chain of the 1-57/4-18 antibody 1-57HC-Hole-Cross

EVHLVESGGGLVQPGGSLRLSCAASGFTFSDHYMDWVRQAPGKGLEWVGR
TRNKANSYTTEYAASVKGRFTISRDDAKNSLYLQMNSLKTEDTAVYYCAR
VHRWAYCINGVCFGAYSDYWGQGTLVTVSSASTAAPSVFIFPPSDEQLKS
GTASVVCLLNNFYPREAKVQWKVDNALQSGNSQESVTEQDSKDSTYSLSS
TLTLSKADYEKHKVYACEVTHQGLSSPVTKSFNRGECDKTHTCPPCPAPE
FEGGPSVFLFPPKPKDTLMISRTPEVTCVVVDVSHEDPEVKFNWYVDGVE
VHNAKTKPREEQYNSTYRVVSVLTVLHQDWLNGKEYKCKVSNKALPASIE
KTISKAKGQPREPQVCTLPPSRDELTKNQVSLSCAVKGFYPSDIAVEWES
NGQPENNYKTTPPVLDSDGSFFLVSKLTVDKSRWQQGNVFSCSVLHEALH
SHYTQKSLSLSPGK

[0789] SEQ ID NO: 156 is the amino acid sequence defining the 1-57 derived light chain of the 1-57/4-18 antibody 1-57VLCH1

EIVLTQSPGTLSLSPGERATLSCRASQSVSSSYLAWYQQKPGQAPRLLIY
GASSRATGIPDRFSGSGSGTDFTLTISRLEPEDFAVYYCQQYGSSPSTFG
QGTKLEIKSSASTKGPSVFPLAPSSKSTSGGTAALGCLVKDYFPEPVTVS
WNSGALTSGVHTFPAVLQSSGLYSLSSVVTVPSSSLGTQTYICNVNHKPS
NTKVDKKVEPKSC

[0790] SEQ ID NO: 157 is the amino acid sequence defining the 4-18 derived heavy chain of the 1-57/4-18 antibody 4-18HC-Knob

QVQLVESGGGVVQPGRSLRLSCAASGFTFSSYGMHWVRQAPGKGLEWVAV
ISYDGSNKHYADSVKGRFTISRDNSKNTLYLQMNSLRAEDTAVYYCAKDS
GYNYGYSWFDPWGQGTLVTVSSASTKGPSVFPLAPSSKSTSGGTAALGCL
VKDYFPEPVTVSWNSGALTSGVHTFPAVLQSSGLYSLSSVVTVPSSSLGT
QTYICNVNHKPSNTKVDKKVEPKSCDKTHTCPPCPAPEFEGGPSVFLFPP
KPKDTLMISRTPEVTCVVVDVSHEDPEVKFNWYVDGVEVHNAKTKPREEQ
YNSTYRVVSVLTVLHQDWLNGKEYKCKVSNKALPASIEKTISKAKGQPRE
PQVYTLPPCRDELTKNQVSLWCLVKGFYPSDIAVEWESNGQPENNYKTTP
PVLDSDGSFFLYSKLTVDKSRWQQGNVFSCSVLHEALHSHYTQKSLSLSP
GK

[0791] SEQ ID NO: 158 is the amino acid sequence defining the 4-18 derived light chain of the 1-57/4-18 antibody 4-18LC

SYELTQPPSVSVSPGQTARITCSADALAKQYAYWYQQKPGQAPVLVIYKD
SERPSGIPERFSGSSSGTTVTLTISGVQAEDEADYYCQSTDNSGTYPNWV
FGGGTKLTVLGQPKAAPSVTLFPPSSEELQANKATLVCLISDFYPGAVTV
AWKADSSPVKAGVETTTPSKQSNNKYAASSYLSLTPEQWKSHRSYSCQVT
HEGSTVEKTVAPTECS

[0792] The 2-7/1-68 bispecific antibody can comprise:

[0793] SEQ ID NO: 159 is the amino acid sequence defining the 2-7 derived heavy chain of the 2-7/1-68 antibody 2-7HC-Hole-Cross

QITLKESGPTLVKPTQTLTLTCTFSGFSLSTSGVGVGWIRQPPGKALEWL
ALIYWDDDKRYSPSLKSRLTITKDTSKNQVVLTMTNMDPVDTATYYCAHH
KIERIFDYWGQGTLVTVSSASTAAPSVFIFPPSDEQLKSGTASVVCLLNN
FYPREAKVQWKVDNALQSGNSQESVTEQDSKDSTYSLSSTLTLSKADYEK
HKVYACEVTHQGLSSPVTKSFNRGECDKTHTCPPCPAPEFEGGPSVFLFP
PKPKDTLMISRTPEVTCVVVDVSHEDPEVKFNWYVDGVEVHNAKTKPREE
QYNSTYRVVSVLTVLHQDWLNGKEYKCKVSNKALPASIEKTISKAKGQPR
EPQVCTLPPSRDELTKNQVSLSCAVKGFYPSDIAVEWESNGQPENNYKTT
PPVLDSDGSFFLVSKLTVDKSRWQQGNVFSCSVLHEALHSHYTQKSLSLS
PGK

[0794] SEQ ID NO: 160 is the amino acid sequence defining the 2-7 derived light chain of the 2-7/1-68 antibody 2-7VLCH1

QSALAQPASVSGSPGQSITISCTGTSSDVGAYNYVSWYQQHPGKAPKLMI
YDVSKRPSGVSNRFSGSKSGNTASLTISGLQAEDEADYYCSSYTTSSTVF
GGGTKLTVLSSASTKGPSVFPLAPSSKSTSGGTAALGCLVKDYFPEPVTV
SWNSGALTSGVHTFPAVLQSSGLYSLSSVVTVPSSSLGTQTYICNVNHKP
SNTKVDKKVEPKSC

[0795] SEQ ID NO: 161 is the amino acid sequence defining the 1-68 derived heavy chain of the 2-7/1-68 antibody 1-68HC-Knob

QVQLVQSGAEVKKPGASVKVSCKVSGYTLIELSMHWVRQAPGKGLEWMGG
FDPEDAETIYAQKFQGRVTMTEDTSTDTAYMELSSLRSEDTAVYYCATGW
AVAGSSDVWYYYYGMDVWGQGTTVTVSSASTKGPSVFPLAPSSKSTSGGT
AALGCLVKDYFPEPVTVSWNSGALTSGVHTFPAVLQSSGLYSLSSVVTVP
SSSLGTQTYICNVNHKPSNTKVDKKVEPKSCDKTHTCPPCPAPEFEGGPS
VFLFPPKPKDTLMISRTPEVTCVVVDVSHEDPEVKFNWYVDGVEVHNAKT
KPREEQYNSTYRVVSVLTVLHQDWLNGKEYKCKVSNKALPASIEKTISKA
KGQPREPQVYTLPPCRDELTKNQVSLWCLVKGFYPSDIAVEWESNGQPEN
NYKTTPPVLDSDGSFFLYSKLTVDKSRWQQGNVFSCSVLHEALHSHYTQK
SLSLSPGK

[0796] SEQ ID NO: 162 is the amino acid sequence defining the 1-68 derived light chain of the 2-7/1-68 antibody 1-68LC

QSALTQPPSVSGSPGQSVTISCTGTSSDVGSYNRVSWYQQPPGTAPKLMI
YEVSNRPSGVPDRFSGSKSGNTASLTISGLQAEDEADYYCSSYTSSSTYV
FGTGTKVTVLGQPKAAPSVTLFPPSSEELQANKATLVCLISDFYPGAVTV
AWKADSSPVKAGVETTTPSKQSNNKYAASSYLSLTPEQWKSHRSYSCQVT
HEGSTVEKTVAPTECS

[0797] The 4-20/4-18 bispecific antibody sequence can comprise:

[0798] SEQ ID NO: 163 is the amino acid sequence defining the 4-20 derived heavy chain of the 4-20/4-18 antibody 4-20HC-Hole-Cross

QVQLLQSGAEVKKPGASVKVSCKASGYSFTSYYMHWVRQAPGQGLEWMGI
INPSGGGTTYAQKFQGRVTMTRDTSTSTVYMELSSLRSEDTAVYYCARPG
GGSYQEFDYWGQGTLVTVSSASTAAPSVFIFPPSDEQLKSGTASVVCLLN
NFYPREAKVQWKVDNALQSGNSQESVTEQDSKDSTYSLSSTLTLSKADYE
KHKVYACEVTHQGLSSPVTKSFNRGECDKTHTCPPCPAPEFEGGPSVFLF
PPKPKDTLMISRTPEVTCVVVDVSHEDPEVKFNWYVDGVEVHNAKTKPRE
EQYNSTYRVVSVLTVLHQDWLNGKEYKCKVSNKALPASIEKTISKAKGQP
REPQVCTLPPSRDELTKNQVSLSCAVKGFYPSDIAVEWESNGQPENNYKT
TPPVLDSDGSFFLVSKLTVDKSRWQQGNVFSCSVLHEALHSHYTQKSLSL
SPGK

[0799] SEQ ID NO: 164 is the amino acid sequence defining the 4-20 derived light chain of the 4-20/4-18 antibody 4-20VLCH1

DIQMTQSPSSLSASVGDRVTITCRASQSISSYLNWYQQKPGKAPKLLISA
ASSLQSGVPSRFSGSGSGTDFTLTISSLQPEDFATYYCQQSYNTLQVTFG
GGTKVEIKSSASTKGPSVFPLAPSSKSTSGGTAALGCLVKDYFPEPVTVS
WNSGALTSGVHTFPAVLQSSGLYSLSSVVTVPSSSLGTQTYICNVNHKPS
NTKVDKKVEPKSC

[0800] SEQ ID NO: 165 is the amino acid sequence defining the 4-18 derived heavy chain of the 4-20/4-18 antibody 4-18HC-Knob

QVQLVESGGGVVQPGRSLRLSCAASGFTFSSYGMHWVRQAPGKGLEWVAV
ISYDGSNKHYADSVKGRFTISRDNSKNTLYLQMNSLRAEDTAVYYCAKDS
GYNYGYSWFDPWGQGTLVTVSSASTKGPSVFPLAPSSKSTSGGTAALGCL
VKDYFPEPVTVSWNSGALTSGVHTFPAVLQSSGLYSLSSVVTVPSSSLGT
QTYICNVNHKPSNTKVDKKVEPKSCDKTHTCPPCPAPEFEGGPSVFLFPP
KPKDTLMISRTPEVTCVVVDVSHEDPEVKFNWYVDGVEVHNAKTKPREEQ
YNSTYRVVSVLTVLHQDWLNGKEYKCKVSNKALPASIEKTISKAKGQPRE
PQVYTLPPCRDELTKNQVSLWCLVKGFYPSDIAVEWESNGQPENNYKTTP
PVLDSDGSFFLYSKLTVDKSRWQQGNVFSCSVLHEALHSHYTQKSLSLSP
GK

[0801] SEQ ID NO: 166 is the amino acid sequence defining the 4-18 derived light chain of the 4-20/4-18 antibody 4-18LC

SYELTQPPSVSVSPGQTARITCSADALAKQYAYWYQQKPGQAPVLVIYKD
SERPSGIPERFSGSSSGTTVTLTISGVQAEDEADYYCQSTDNSGTYPNWV
FGGGTKLTVLGQPKAAPSVTLFPPSSEELQANKATLVCLISDFYPGAVTV
AWKADSSPVKAGVETTTPSKQSNNKYAASSYLSLTPEQWKSHRSYSCQVT
HEGSTVEKTVAPTECS

[0802] The 2-15 mut/2-51 bispecific antibody sequence can comprise:

[0803] SEQ ID NO: 167 is the amino acid sequence defining the 2-15 mut derived heavy chain of the 2-15 mut/2-51 antibody 2-15HC-Hole-Cross

QVQLVQSGAEVKKPGASVRVSCKASGYTFTGYYMHWVRQAPGQGLEWMGW
INPISDGTNYAQKFQGWVTMTRDTSISTVYMELSRLRSDDTAVYYCARGG
SRCSGGNCYGWAYDAFDIWGQGTMITVSSASTAAPSVFIFPPSDEQLKSG
TASVVCLLNNFYPREAKVQWKVDNALQSGNSQESVTEQDSKDSTYSLSST
LTLSKADYEKHKVYACEVTHQGLSSPVTKSFNRGECDKTHTCPPCPAPEF
EGGPSVFLFPPKPKDTLMISRTPEVTCVVVDVSHEDPEVKFNWYVDGVEV
HNAKTKPREEQYNSTYRVVSVLTVLHQDWLNGKEYKCKVSNKALPASIEK
TISKAKGQPREPQVCTLPPSRDELTKNQVSLSCAVKGFYPSDIAVEWESN
GQPENNYKTTPPVLDSDGSFFLVSKLTVDKSRWQQGNVFSCSVLHEALHS
HYTQKSLSLSPGK

[0804] SEQ ID NO: 168 is the amino acid sequence defining the 2-15 mut derived light chain of the 2-15 mut/2-51 antibody 2-15 mutVLCH1

QSALTQPASVSGSPGQSITISCTGTSSDVGGYNFVSWYQQHPGKAPKLMI
YDVSKRPSGVSNRFSGSKSGNTASLTISGLQAEDEADSYCSSYTSSSTFV
FGTGTKVTVLSSASTKGPSVFPLAPSSKSTSGGTAALGCLVKDYFPEPVT
VSWNSGALTSGVHTFPAVLQSSGLYSLSSVVTVPSSSLGTQTYICNVNHK
PSNTKVDKKVEPKSC

[0805] SEQ ID NO: 169 is the amino acid sequence defining the 2-51 derived heavy chain of the 2-15 mut/2-51 antibody 2-51 HC-Knob

QVQLVQSGAEVKKPGASVKVSCKVSGYTLIELSMHWVRQAPGKGLEWMGG
FDPEDVETIYAQQFQGRVTMTEDTSTDTAYMELSSLRSEDTAVYYCATGW
AYKSTWYFGYWGQGTLVTVSSASTKGPSVFPLAPSSKSTSGGTAALGCLV
KDYFPEPVTVSWNSGALTSGVHTFPAVLQSSGLYSLSSVVTVPSSSLGTQ
TYICNVNHKPSNTKVDKKVEPKSCDKTHTCPPCPAPEFEGGPSVFLFPPK
PKDTLMISRTPEVTCVVVDVSHEDPEVKFNWYVDGVEVHNAKTKPREEQY
NSTYRVVSVLTVLHQDWLNGKEYKCKVSNKALPASIEKTISKAKGQPREP
QVYTLPPCRDELTKNQVSLWCLVKGFYPSDIAVEWESNGQPENNYKTTPP
VLDSDGSFFLYSKLTVDKSRWQQGNVFSCSVLHEALHSHYTQKSLSLSPG
K

[0806] SEQ ID NO: 170 is the amino acid sequence defining the 2-51 derived light chain of the 2-15 mut/2-51 antibody 2-51LC

QSALTQPPSASGSPGQSVTISCTGTSSDVGGYNYVSWYQQHPGKAPKLMI
YEVSKRPSGVPDRFSGSKSGNTASLTVSGLQAEDEADYYCSSYAGSRMGF
GGGTKLTVLGQPKAAPSVTLFPPSSEELQANKATLVCLISDFYPGAVTVA
WKADSSPVKAGVETTTPSKQSNNKYAASSYLSLTPEQWKSHRSYSCQVTH
EGSTVEKTVAPTECS

[0807] The 4-20/4-8(39/51) bispecific antibody sequence can comprise:

[0808] SEQ ID NO: 171 is the amino acid sequence defining the 4-20 derived heavy chain of the 4-20/4-8(39/51) antibody 4-20HC-Hole-Cross

QVQLLQSGAEVKKPGASVKVSCKASGYSFTSYYMHWVRQAPGQGLEWMGI
INPSGGGTTYAQKFQGRVTMTRDTSTSTVYMELSSLRSEDTAVYYCARPG
GGSYQEFDYWGQGTLVTVSSASTAAPSVFIFPPSDEQLKSGTASVVCLLN
NFYPREAKVQWKVDNALQSGNSQESVTEQDSKDSTYSLSSTLTLSKADYE
KHKVYACEVTHQGLSSPVTKSFNRGECDKTHTCPPCPAPEFEGGPSVFLF
PPKPKDTLMISRTPEVTCVVVDVSHEDPEVKFNWYVDGVEVHNAKTKPRE
EQYNSTYRVVSVLTVLHQDWLNGKEYKCKVSNKALPASIEKTISKAKGQP
REPQVCTLPPSRDELTKNQVSLSCAVKGFYPSDIAVEWESNGQPENNYKT
TPPVLDSDGSFFLVSKLTVDKSRWQQGNVFSCSVLHEALHSHYTQKSLSL
SPGK

[0809] SEQ ID NO: 172 is the amino acid sequence defining the 4-20 derived light chain of the 4-20/4-8(39/51) antibody 4-20VLCH1

DIQMTQSPSSLSASVGDRVTITCRASQSISSYLNWYQQKPGKAPKLLISA
ASSLQSGVPSRFSGSGSGTDFTLTISSLQPEDFATYYCQQSYNTLQVTFG
GGTKVEIKSSASTKGPSVFPLAPSSKSTSGGTAALGCLVKDYFPEPVTVS
WNSGALTSGVHTFPAVLQSSGLYSLSSVVTVPSSSLGTQTYICNVNHKPS
NTKVDKKVEPKSC

[0810] SEQ ID NO: 173 is the amino acid sequence defining the 4-8(39/51) derived heavy chain of the 4-20/4-8(39/51) antibody 4-8(39/51) HC-Knob

QVQLVQSGAEVKKAGSSVKVSCKASGGTFSSHTITWVRLAPGQGLEW
MGRNIPILGIANYAQKFQGRVTITADKSTSTAYMELSSLRSEDTAVY
YCASLQTVDTAIEKYYGMDVWGQGTTVTVSSASTKGPSVFPLAPSSK
STSGGTAALGCLVKDYFPEPVTVSWNSGALTSGVHTFPAVLQSSGLY
SLSSVVTVPSSSLGTQTYICNVNHKPSNTKVDKKVEPKSCDKTHTCP
PCPAPEFEGGPSVFLFPPKPKDTLMISRTPEVTCVVVDVSHEDPEVK
FNWYVDGVEVHNAKTKPREEQYNSTYRVVSVLTVLHQDWLNGKEYKC
KVSNKALPASIEKTISKAKGQPREPQVYTLPPCRDELTKNQVSLWCL
VKGFYPSDIAVEWESNGQPENNYKTTPPVLDSDGSFFLYSKLTVDKS
RWQQGNVFSCSVLHEALHSHYTQKSLSLSPGK

[0811] SEQ ID NO: 174 is the amino acid sequence defining the 4-8(39/51) derived light chain of the 4-20/4-8(39/51) antibody 4-8(39/51)LC

SYELTQPPSVSVSPGQTASITCSGDKLGDKYACWYQQKPGQSPVLVI
YQDNKRPSGIPERFSGSNSGNTATLTISGTQAMDEADYYCQAWDSST
AVFGGGTKLTVLGQPKAAPSVTLFPPSSEELQANKATLVCLISDFYP
GAVTVAWKADSSPVKAGVETTTPSKQSNNKYAASSYLSLTPEQWKSH
RSYSCQVTHEGSTVEKTVAPTECS

[0812] The 1-57/2-51 bispecific antibody sequence can comprise:

[0813] SEQ ID NO: 175 is the amino acid sequence defining the 1-57 derived heavy chain of the 1-57/2-51 antibody 1-57HC-Hole-Cross

EVHLVESGGGLVQPGGSLRLSCAASGFTFSDHYMDWVRQAPGKGLEW
VGRTRNKANSYTTEYAASVKGRFTISRDDAKNSLYLQMNSLKTEDTA
VYYCARVHRWAYCINGVCFGAYSDYWGQGTLVTVSSASTAAPSVFIF
PPSDEQLKSGTASVVCLLNNFYPREAKVQWKVDNALQSGNSQESVTE
QDSKDSTYSLSSTLTLSKADYEKHKVYACEVTHQGLSSPVTKSFNRG
ECDKTHTCPPCPAPEFEGGPSVFLFPPKPKDTLMISRTPEVTCVVVD
VSHEDPEVKFNWYVDGVEVHNAKTKPREEQYNSTYRVVSVLTVLHQD
WLNGKEYKCKVSNKALPASIEKTISKAKGQPREPQVCTLPPSRDELT
KNQVSLSCAVKGFYPSDIAVEWESNGQPENNYKTTPPVLDSDGSFFL
VSKLTVDKSRWQQGNVFSCSVLHEALHSHYTQKSLSLSPGK

[0814] SEQ ID NO: 176 is the amino acid sequence defining the 1-57 derived light chain of the 1-57/2-51 antibody 1-57VLCH1

EIVLTQSPGTLSLSPGERATLSCRASQSVSSSYLAWYQQKPGQAPRL
LIYGASSRATGIPDRFSGSGSGTDFTLTISRLEPEDFAVYYCQQYGS
SPSTFGQGTKLEIKSSASTKGPSVFPLAPSSKSTSGGTAALGCLVKD
YFPEPVTVSWNSGALTSGVHTFPAVLQSSGLYSLSSVVTVPSSSLGT
QTYICNVNHKPSNTKVDKKVEPKSC

[0815] SEQ ID NO: 177 is the amino acid sequence defining the 2-51 derived heavy chain of the 1-57/2-51 antibody 2-51 HC-Knob

QVQLVQSGAEVKKPGASVKVSCKVSGYTLIELSMHWVRQAPGKGLEW
MGGFDPEDVETIYAQQFQGRVTMTEDTSTDTAYMELSSLRSEDTAVY
YCATGWAYKSTWYFGYWGQGTLVTVSSASTKGPSVFPLAPSSKSTSG
GTAALGCLVKDYFPEPVTVSWNSGALTSGVHTFPAVLQSSGLYSLSS
VVTVPSSSLGTQTYICNVNHKPSNTKVDKKVEPKSCDKTHTCPPCPA
PEFEGGPSVFLFPPKPKDTLMISRTPEVTCVVVDVSHEDPEVKFNWY
VDGVEVHNAKTKPREEQYNSTYRVVSVLTVLHQDWLNGKEYKCKVSN
KALPASIEKTISKAKGQPREPQVYTLPPCRDELTKNQVSLWCLVKGF
YPSDIAVEWESNGQPENNYKTTPPVLDSDGSFFLYSKLTVDKSRWQQ
GNVFSCSVLHEALHSHYTQKSLSLSPGK

[0816] SEQ ID NO: 178 is the amino acid sequence defining the 2-51 derived light chain of the 1-57/2-51 antibody 2-51LC

QSALTQPPSASGSPGQSVTISCTGTSSDVGGYNYVSWYQQHPGKAPK
LMIYEVSKRPSGVPDRFSGSKSGNTASLTVSGLQAEDEADYYCSSYA
GSRMGFGGGTKLTVLGQPKAAPSVTLFPPSSEELQANKATLVCLISD
FYPGAVTVAWKADSSPVKAGVETTTPSKQSNNKYAASSYLSLTPEQW
KSHRSYSCQVTHEGSTVEKTVAPTECS

[0817] The 4-20/1-87 bispecific antibody sequence can comprise:

[0818] SEQ ID NO: 179 is the amino acid sequence defining the 4-20 derived heavy chain of the 4-20/1-87 antibody 4-20HC-Hole-Cross

QVQLLQSGAEVKKPGASVKVSCKASGYSFTSYYMHWVRQAPGQGLEW
MGIINPSGGGTTYAQKFQGRVTMTRDTSTSTVYMELSSLRSEDTAVY
YCARPGGGSYQEFDYWGQGTLVTVSSASTAAPSVFIFPPSDEQLKSG
TASVVCLLNNFYPREAKVQWKVDNALQSGNSQESVTEQDSKDSTYSL
SSTLTLSKADYEKHKVYACEVTHQGLSSPVTKSFNRGECDKTHTCPP
CPAPEFEGGPSVFLFPPKPKDTLMISRTPEVTCVVVDVSHEDPEVKF
NWYVDGVEVHNAKTKPREEQYNSTYRVVSVLTVLHQDWLNGKEYKCK
VSNKALPASIEKTISKAKGQPREPQVCTLPPSRDELTKNQVSLSCAV
KGFYPSDIAVEWESNGQPENNYKTTPPVLDSDGSFFLVSKLTVDKSR
WQQGNVFSCSVLHEALHSHYTQKSLSLSPGK

[0819] SEQ ID NO: 180 is the amino acid sequence defining the 4-20 derived light chain of the 4-20/1-87 antibody 4-20VLCH1

DIQMTQSPSSLSASVGDRVTITCRASQSISSYLNWYQQKPGKAPKLL
ISAASSLQSGVPSRFSGSGSGTDFTLTISSLQPEDFATYYCQQSYNT
LQVTFGGGTKVEIKSSASTKGPSVFPLAPSSKSTSGGTAALGCLVKD
YFPEPVTVSWNSGALTSGVHTFPAVLQSSGLYSLSSVVTVPSSSLGT
QTYICNVNHKPSNTKVDKKVEPKSC

[0820] SEQ ID NO: 181 is the amino acid sequence defining the 1-87 derived heavy chain of the 4-20/1-87 antibody 1-87HC-Knob

QVQLVQSGAEVKKPGASVKVSCKVSGYTLIELSMHWVRQAPGKGLEW
MGGFDPEDAETIYAQKFQGRVTMTEDTSTDTAYMELSSLRSEDTAVY
YCATGIAVIGPPPSTYYYYGMDVWGQGTTVTVSSASTKGPSVFPLAP
SSKSTSGGTAALGCLVKDYFPEPVTVSWNSGALTSGVHTFPAVLQSS
GLYSLSSVVTVPSSSLGTQTYICNVNHKPSNTKVDKKVEPKSCDKTH
TCPPCPAPEFEGGPSVFLFPPKPKDTLMISRTPEVTCVVVDVSHEDP
EVKFNWYVDGVEVHNAKTKPREEQYNSTYRVVSVLTVLHQDWLNGKE
YKCKVSNKALPASIEKTISKAKGQPREPQVYTLPPCRDELTKNQVSL
WCLVKGFYPSDIAVEWESNGQPENNYKTTPPVLDSDGSFFLYSKLTV
DKSRWQQGNVFSCSVLHEALHSHYTQKSLSLSPGK

[0821] SEQ ID NO: 182 is the amino acid sequence defining the 1-87 derived light chain of the 4-20/1-87 antibody 1-87LC

QSALTQPASVSGSPGQSITISCTGTSSDVGGYNYVSWYQQHPGKAPK
LMIYDVSKRPSGVSNRFSGSKSGNTASLTISGLQAEDEADYYCSSYT
SSSTYVFGTGTKVTVLGQPKAAPSVTLFPPSSEELQANKATLVCLIS
DFYPGAVTVAWKADSSPVKAGVETTTPSKQSNNKYAASSYLSLTPEQ
WKSHRSYSCQVTHEGSTVEKTVAPTECS

[0822] The 1-57/1-68 bispecific antibody sequence can comprise:

[0823] SEQ ID NO: 183 is the amino acid sequence defining the 1-57 derived heavy chain of the 1-57/1-68 antibody 1-57HC-Hole-Cross

EVHLVESGGGLVQPGGSLRLSCAASGFTFSDHYMDWVRQAPGKGLEW
VGRTRNKANSYTTEYAASVKGRFTISRDDAKNSLYLQMNSLKTEDTA
VYYCARVHRWAYCINGVCFGAYSDYWGQGTLVTVSSASTAAPSVFIF
PPSDEQLKSGTASVVCLLNNFYPREAKVQWKVDNALQSGNSQESVTE
QDSKDSTYSLSSTLTLSKADYEKHKVYACEVTHQGLSSPVTKSFNRG
ECDKTHTCPPCPAPEFEGGPSVFLFPPKPKDTLMISRTPEVTCVVVD
VSHEDPEVKFNWYVDGVEVHNAKTKPREEQYNSTYRVVSVLTVLHQD
WLNGKEYKCKVSNKALPASIEKTISKAKGQPREPQVCTLPPSRDELT
KNQVSLSCAVKGFYPSDIAVEWESNGQPENNYKTTPPVLDSDGSFFL
VSKLTVDKSRWQQGNVFSCSVLHEALHSHYTQKSLSLSPGK

[0824] SEQ ID NO: 184 is the amino acid sequence defining the 1-57 derived light chain of the 1-57/1-68 antibody 1-57VLCH1

EIVLTQSPGTLSLSPGERATLSCRASQSVSSSYLAWYQQKPGQAPRL
LIYGASSRATGIPDRFSGSGSGTDFTLTISRLEPEDFAVYYCQQYGS
SPSTFGQGTKLEIKSSASTKGPSVFPLAPSSKSTSGGTAALGCLVKD
YFPEPVTVSWNSGALTSGVHTFPAVLQSSGLYSLSSVVTVPSSSLGT
QTYICNVNHKPSNTKVDKKVEPKSC

[0825] SEQ ID NO: 185 is the amino acid sequence defining the 1-68 derived heavy chain of the 1-57/1-68 antibody 1-68HC-Knob

QVQLVQSGAEVKKPGASVKVSCKVSGYTLIELSMHWVRQAPGKGLEW
MGGFDPEDAETIYAQKFQGRVTMTEDTSTDTAYMELSSLRSEDTAVY
YCATGWAVAGSSDVWYYYYGMDVWGQGTTVTVSSASTKGPSVFPLAP
SSKSTSGGTAALGCLVKDYFPEPVTVSWNSGALTSGVHTFPAVLQSS
GLYSLSSVVTVPSSSLGTQTYICNVNHKPSNTKVDKKVEPKSCDKTH
TCPPCPAPEFEGGPSVFLFPPKPKDTLMISRTPEVTCVVVDVSHEDP
EVKFNWYVDGVEVHNAKTKPREEQYNSTYRVVSVLTVLHQDWLNGKE
YKCKVSNKALPASIEKTISKAKGQPREPQVYTLPPCRDELTKNQVSL
WCLVKGFYPSDIAVEWESNGQPENNYKTTPPVLDSDGSFFLYSKLTV
DKSRWQQGNVFSCSVLHEALHSHYTQKSLSLSPGK

[0826] SEQ ID NO: 186 is the amino acid sequence defining the 1-68 derived light chain of the 1-57/1-68 antibody 1-68LC

QSALTQPPSVSGSPGQSVTISCTGTSSDVGSYNRVSWYQQPPGTAPK
LMIYEVSNRPSGVPDRFSGSKSGNTASLTISGLQAEDEADYYCSSYT
SSSTYVFGTGTKVTVLGQPKAAPSVTLFPPSSEELQANKATLVCLIS
DFYPGAVTVAWKADSSPVKAGVETTTPSKQSNNKYAASSYLSLTPEQ
WKSHRSYSCQVTHEGSTVEKTVAPTECS

[0827] Bispecific antibodies with LS mutations only

[0828] The 2-7/4-8(39/51/57) bispecific antibody sequence can comprise:

[0829] SEQ ID NO: 187 is the amino acid sequence defining the 2-7 derived heavy chain of the 2-7/4-8(39/51/57) antibody 2-7HC-Hole-Cross

QITLKESGPTLVKPTQTLTLTCTFSGFSLSTSGVGVGWIRQPPGKAL
EWLALIYWDDDKRYSPSLKSRLTITKDTSKNQVVLTMTNMDPVDTAT
YYCAHHKIERIFDYWGQGTLVTVSSASTAAPSVFIFPPSDEQLKSGT
ASVVCLLNNFYPREAKVQWKVDNALQSGNSQESVTEQDSKDSTYSLS
STLTLSKADYEKHKVYACEVTHQGLSSPVTKSFNRGECDKTHTCPPC
PAPELLGGPSVFLFPPKPKDTLMISRTPEVTCVVVDVSHEDPEVKFN
WYVDGVEVHNAKTKPREEQYNSTYRVVSVLTVLHQDWLNGKEYKCKV
SNKALPAPIEKTISKAKGQPREPQVCTLPPSRDELTKNQVSLSCAVK
GFYPSDIAVEWESNGQPENNYKTTPPVLDSDGSFFLVSKLTVDKSRW
QQGNVFSCSVLHEALHSHYTQKSLSLSPGK

[0830] SEQ ID NO: 188 is the amino acid sequence defining the 2-7 derived light chain of the 2-7/4-8(39/51/57) antibody 2-7VLCH1

QSALAQPASVSGSPGQSITISCTGTSSDVGAYNYVSWYQQHPGKAPK
LMIYDVSKRPSGVSNRFSGSKSGNTASLTISGLQAEDEADYYCSSYT
TSSTVFGGGTKLTVLSSASTKGPSVFPLAPSSKSTSGGTAALGCLVK
DYFPEPVTVSWNSGALTSGVHTFPAVLQSSGLYSLSSVVTVPSSSLG
TQTYICNVNHKPSNTKVDKKVEPKSC

[0831] SEQ ID NO: 189 is the amino acid sequence defining the 4-8(39/51/57) derived heavy chain of the 2-7/4-8(39/51/57) antibody 4-8(39/51/57) HC-Knob

QVQLVQSGAEVKKAGSSVKVSCKASGGTFSSHTITWVRLAPGQ
GLEWMGRNIPILGTANYAQKFQGRVTITADKSTSTAYMELSSL
RSEDTAVYYCASLQTVDTAIEKYYGMDVWGQGTTVTVSSASTK
GPSVFPLAPSSKSTSGGTAALGCLVKDYFPEPVTVSWNSGALT
SGVHTFPAVLQSSGLYSLSSVVTVPSSSLGTQTYICNVNHKPS
NTKVDKKVEPKSCDKTHTCPPCPAPELLGGPSVFLFPPKPKDT
LMISRTPEVTCVVVDVSHEDPEVKFNWYVDGVEVHNAKTKPRE
EQYNSTYRVVSVLTVLHQDWLNGKEYKCKVSNKALPAPIEKTI
SKAKGQPREPQVYTLPPCRDELTKNQVSLWCLVKGFYPSDIAV
EWESNGQPENNYKTTPPVLDSDGSFFLYSKLTVDKSRWQQGNV
FSCSVLHEALHSHYTQKSLSLSPGK

[0832] SEQ ID NO: 190 is the amino acid sequence defining the 4-8(39/51/57) derived light chain of the 2-7/4-8(39/51/57) antibody 4-8LC

SYELTQPPSVSVSPGQTASITCSGDKLGDKYACWY
QQKPGQSPVLVIYQDNKRPSGIPERFSGSNSGNTA
TLTISGTQAMDEADYYCQAWDSSTAVFGGGTKLTV
LGQPKAAPSVTLFPPSSEELQANKA
TLVCLISDFYPGAVTVAWKADSSPVKAGVETTTPS
KQSNNKYAASSYLSLTPEQWKSHRSYSCQVTHEGS
TVEKTVAPTECS

[0833] The 2-17/2-36 bispecific antibody sequence can comprise:

[0834] SEQ ID NO: 191 is the amino acid sequence defining the 2-17 derived heavy chain of the 2-17/2-36 antibody 2-17HC-Hole-Cross

QVQLVQSGAEVKKPGSSVKVSCKASGGTFSSYAISW
VRQAPGQGLEWMGGNIPIFGTANYAQKFQGRVTIT
ADESTSTAYMELSSLRSEDTAVYYCARGVGYRGVI
PLNWFDPWGQGTVVTVSSASTAAPSVFIFPPSDEQ
LKSGTASVVCLLNNFYPREAKVQWKVDNALQSGNS
QESVTEQDSKDSTYSLSSTLTLSKADYEKHKVYAC
EVTHQGLSSPVTKSFNRGECDKTHTCPPCPAPELL
GGPSVFLFPPKPKDTLMISRTPEVTCVVVDVSHED
PEVKFNWYVDGVEVHNAKTKPREEQYNSTYRVVSV
LTVLHQDWLNGKEYKCKVSNKALPAPIEKTISKAK
GQPREPQVCTLPPSRDELTKNQVSLSCAVKGFYPS
DIAVEWESNGQPENNYKTTPPVLDSDGSFFLVSKL
TVDKSRWQQGNVFSCSVLHEALHSHYTQKSLSLSP
GK

[0835] SEQ ID NO: 192 is the amino acid sequence defining the 2-17 derived light chain of the 2-17/2-36 antibody 2-17VLCH1

EIVMTQSPATLSVSPGERATLSCRASQSVSSDLAWYQH
KPGQAPRLLIYGASTRATGIPVRFSGSGSGTEFTLTIS
SLQSEDFAVYYCQQYNNQPPFTFGGGTKVEIKSSASTK
GPSVFPLAPSSKSTSGGTAALGCLVKDYFPEPVTVSWN
SGALTSGVHTFPAVLQSSGLYSLSSVVTVPSSSLGTQT
YICNVNHKPSNTKVDKKVEPKSC

[0836] SEQ ID NO: 193 is the amino acid sequence defining the 2-36 derived heavy chain of the 2-17/2-36 antibody 2-36HC-Knob

QVQLQESGPGLVKPSETLSLTCTVSGGSVSSSNYYWSW
IRQPPGKGLEWIGYMYYSGSTKYNPSLKSRVTISVDTS
KNQFSLKLSSVTAADTAVYYCAREVYYYDRSGYYASDG
FDIWGQGTMVTVSSASTKGPSVFPLAPSSKSTSGGTAA
LGCLVKDYFPEPVTVSWNSGALTSGVHTFPAVLQSSGL
YSLSSVVTVPSSSLGTQTYICNVNHKPSNTKVDKKVEP
KSCDKTHTCPPCPAPELLGGPSVFLFPPKPKDTLMISR
TPEVTCVVVDVSHEDPEVKFNWYVDGVEVHNAKTKPRE
EQYNSTYRVVSVLTVLHQDWLNGKEYKCKVSNKALPAP
IEKTISKAKGQPREPQVYTLPPCRDELTKNQVSLWCLV
KGFYPSDIAVEWESNGQPENNYKTTPPVLDSDGSFFLY
SKLTVDKSRWQQGNVFSCSVLHEALHSHYTQKSLSLSP
GK

[0837] SEQ ID NO: 194 is the amino acid sequence defining the 2-36 derived light chain of the 2-17/2-36 antibody 2-36LC

EIVLTQSPGTLSLSPGERATLSCRASQSVSSSYLA
WYQQKPGQAPRLLIYGASSRATGIPDRFSGSGSGT
DFTLTISRLEPEDFAVYYCQQYGSSPQTFGQGTKV
EIKRTVAAPSVFIFPPSDEQLKSGTASVVCLLNNF
YPREAKVQWKVDNALQSGNSQESVTEQDSKDSTYS
LSSTLTLSKADYEKHKVYACEVTHQGLSSPVTKSF
NRGEC

[0838] The 2-36/1-68 bispecific antibody sequence:

[0839] SEQ ID NO: 195 is the amino acid sequence defining the 2-36 derived heavy chain of the 2-36/1-68 antibody 2-36HC-Hole-Cross

QVQLQESGPGLVKPSETLSLTCTVSGGSVSSSNYY
WSWIRQPPGKGLEWIGYMYYSGSTKYNPSLKSRVT
ISVDTSKNQFSLKLSSVTAADTAVYYCAREVYYYD
RSGYYASDGFDIWGQGTMVTVSSASTAAPSVFIFP
PSDEQLKSGTASVVCLLNNFYPREAKVQWKVDNAL
QSGNSQESVTEQDSKDSTYSLSSTLTLSKADYEKH
KVYACEVTHQGLSSPVTKSFNRGECDKTHTCPPCP
APELLGGPSVFLFPPKPKDTLMISRTPEVTCVVVD
VSHEDPEVKFNWYVDGVEVHNAKTKPREEQYNSTY
RVVSVLTVLHQDWLNGKEYKCKVSNKALPAPIEKT
ISKAKGQPREPQVCTLPPSRDELTKNQVSLSCAVK
GFYPSDIAVEWESNGQPENNYKTTPPVLDSDGSFF
LVSKLTVDKSRWQQGNVFSCSVLHEALHSHYTQKS
LSLSPGK

[0840] SEQ ID NO: 196 is the amino acid sequence defining the 2-36 derived light chain of the 2-36/1-68 antibody 2-36VLCH1

EIVLTQSPGTLSLSPGERATLSCRASQSVSSSYLA
WYQQKPGQAPRLLIYGASSRATGIPDRFSGSGSGT
DFTLTISRLEPEDFAVYYCQQYGSSPQTFGQGTKV
EIKSSASTKGPSVFPLAPSSKSTSGGTAALGCLVK
DYFPEPVTVSWNSGALTSGVHTFPAVLQSSGLYSL
SSVVTVPSSSLGTQTYICNVNHKPSNTKVDKKVEP
KSC

[0841] SEQ ID NO: 197 is the amino acid sequence defining the 1-68 derived heavy chain of the 2-36/1-68 antibody 1-68HC-Knob

QVQLVQSGAEVKKPGASVKVSCKVSGYTLIELSMH
WVRQAPGKGLEWMGGFDPEDAETTYAQKFQGRVTM
TEDTSTDTAYMELSSLRSEDTAVYYCATGWAVAGS
SDVWYYYYGMDVWGQGTTVTVSSASTKGPSVFPLA
PSSKSTSGGTAALGCLVKDYFPEPVTVSWNSGALT
SGVHTFPAVLQSSGLYSLSSVVTVPSSSLGTQTYI
CNVNHKPSNTKVDKKVEPKSCDKTHTCPPCPAPEL
LGGPSVFLFPPKPKDTLMISRTPEVTCVVVDVSHE
DPEVKFNWYVDGVEVHNAKTKPREEQYNSTYRVVS
VLTVLHQDWLNGKEYKCKVSNKALPAPIEKTISKA
KGQPREPQVYTLPPCRDELTKNQVSLWCLVKGFYP
SDIAVEWESNGQPENNYKTTPPVLDSDGSFFLYSK
LTVDKSRWQQGNVFSCSVLHEALHSHYTQKSLSLS
PGK

[0842] SEQ ID NO: 198 is the amino acid sequence defining the 1-68 derived light chain of the 2-36/1-68 antibody 1-68LC

QSALTQPPSVSGSPGQSVTISCTGTSSDVGSYNRV
SWYQQPPGTAPKLMIYEVSNRPSGVPDRFSGSKSG
NTASLTISGLQAEDEADYYCSSYTSSSTYVFGTGT
KVTVLGQPKAAPSVTLFPPSSEELQANKATLVCLI
SDFYPGAVTVAWKADSSPVKAGVETTTPSKQSNNK
YAASSYLSLTPEQWKSHRSYSCQVTHEGSTVEKTV
APTECS

[0843] The 2-36/4-18 bispecific antibody sequence can comprise:

[0844] SEQ ID NO: 199 is the amino acid sequence defining the 2-36 derived heavy chain of the 2-36/4-18 antibody 2-36HC-Hole-Cross

QVQLQESGPGLVKPSETLSLTCTVSGGSVSSSNYY
WSWIRQPPGKGLEWIGYMYYSGSTKYNPSLKSRVT
ISVDTSKNQFSLKLSSVTAADTAVYYCAREVYYYD
RSGYYASDGFDIWGQGTMVTVSSASTAAPSVFIFP
PSDEQLKSGTASVVCLLNNFYPREAKVQWKVDNAL
QSGNSQESVTEQDSKDSTYSLSSTLTLSKADYEKH
KVYACEVTHQGLSSPVTKSFNRGECDKTHTCPPCP
APELLGGPSVFLFPPKPKDTLMISRTPEVTCVVVD
VSHEDPEVKFNWYVDGVEVHNAKTKPREEQYNSTY
RVVSVLTVLHQDWLNGKEYKCKVSNKALPAPIEKT
ISKAKGQPREPQVCTLPPSRDELTKNQVSLSCAVK
GFYPSDIAVEWESNGQPENNYKTTPPVLDSDGSFF
LVSKLTVDKSRWQQGNVFSCSVLHEALHSHYTQKS
LSLSPGK

[0845] SEQ ID NO: 200 is the amino acid sequence defining the 2-36 derived light chain of the 2-36/4-18 antibody 2-36VLCH1

EIVLTQSPGTLSLSPGERATLSCRASQSVSSSYLA
WYQQKPGQAPRLLIYGASSRATGIPDRFSGSGSGT
DFTLTISRLEPEDFAVYYCQQYGSSPQTFGQGTKV
EIKSSASTKGPSVFPLAPSSKSTSGGTAALGCLVK
DYFPEPVTVSWNSGALTSGVHTFPAVLQSSGLYSL
SSVVTVPSSSLGTQTYICNVNHKPSNTKVDKKVEP
KSC

[0846] SEQ ID NO: 201 is the amino acid sequence defining the 4-18 derived heavy chain of the 2-36/4-18 antibody 4-18HC-Knob

QVQLVESGGGVVQPGRSLRLSCAASGFTFSSYGMH
WVRQAPGKGLEWVAVISYDGSNKHYADSVKGRFTI
SRDNSKNTLYLQMNSLRAEDTAVYYCAKDSGYNYG
YSWFDPWGQGTLVTVSSASTKGPSVFPLAPSSKST
SGGTAALGCLVKDYFPEPVTVSWNSGALTSGVHTF
PAVLQSSGLYSLSSVVTVPSSSLGTQTYICNVNHK
PSNTKVDKKVEPKSCDKTHTCPPCPAPELLGGPSV
FLFPPKPKDTLMISRTPEVTCVVVDVSHEDPEVKF
NWYVDGVEVHNAKTKPREEQYNSTYRVVSVLTVLH
QDWLNGKEYKCKVSNKALPAPIEKTISKAKGQPRE
PQVYTLPPCRDELTKNQVSLWCLVKGFYPSDIAVE
WESNGQPENNYKTTPPVLDSDGSFFLYSKLTVDKS
RWQQGNVFSCSVLHEALHSHYTQKSLSLSPGK

[0847] SEQ ID NO: 202 is the amino acid sequence defining the 4-18 derived light chain of the 2-36/4-18 antibody 4-18LC

SYELTQPPSVSVSPGQTARITCSADALAKQYAYWY
QQKPGQAPVLVIYKDSERPSGIPERFSGSSSGTTV
TLTISGVQAEDEADYYCQSTDNSGTYPNWVFGGGT
KLTVLGQPKAAPSVTLFPPSSEELQANKATLVCLI
SDFYPGAVTVAWKADSSPVKAGVETTTPSKQSNNK
YAASSYLSLTPEQWKSHRSYSCQVTHEGSTVEKTV
APTECS

[0848] The 2-30/1-68 bispecific antibody sequence can comprise:

[0849] SEQ ID NO: 203 is the amino acid sequence defining the 2-30 derived heavy chain of the 2-30/1-68 antibody 2-30HC-Hole-Cross

QVQLVESGGGVVQPGRSLRLSCAASGFTFSSYTMHWVRQAPGKGLEW
VAAISYDGNNKYYADSVKGRFTISRDNSKNTLYLQMNSLRAEDTAVY
YCARSILYGGGMDVWGQGTTVTVSSASTAAPSVFIFPPSDEQLKSGT
ASVVCLLNNFYPREAKVQWKVDNALQSGNSQESVTEQDSKDSTYSLS
STLTLSKADYEKHKVYACEVTHQGLSSPVTKSFNRGECDKTHTCPPC
PAPELLGGPSVFLFPPKPKDTLMISRTPEVTCVVVDVSHEDPEVKFN
WYVDGVEVHNAKTKPREEQYNSTYRVVSVLTVLHQDWLNGKEYKCKV
SNKALPAPIEKTISKAKGQPREPQVCTLPPSRDELTKNQVSLSCAVK
GFYPSDIAVEWESNGQPENNYKTTPPVLDSDGSFFLVSKLTVDKSRW
QQGNVFSCSVLHEALHSHYTQKSLSLSPGK

[0850] SEQ ID NO: 204 is the amino acid sequence defining the 2-30 derived light chain of the 2-30/1-68 antibody 2-30VLCH1

DIQLTQSPSSLSASVGDRVTITCRASQGISSYLAWYQQKPGQAPKLL
IYAASTLQSGVPSRFSGSGSGTDFTLTISSLQPEDFATYYCQQLNSY
PLTFGGGTKVEIKSSASTKGPSVFPLAPSSKSTSGGTAALGCLVKDY
FPEPVTVSWNSGALTSGVHTFPAVLQSSGLYSLSSVVTVPSSSLGTQ
TYICNVNHKPSNTKVDKKVEPKSC

[0851] SEQ ID NO: 205 is the amino acid sequence defining the 1-68 derived heavy chain of the 2-30/1-68 antibody 1-68HC-Knob

QVQLVQSGAEVKKPGASVKVSCKVSGYTLIELSMHWVRQAPGKGLEW
MGGFDPEDAETIYAQKFQGRVTMTEDTSTDTAYMELSSLRSEDTAVY
YCATGWAVAGSSDVWYYYYGMDVWGQGTTVTVSSASTKGPSVFPLAP
SSKSTSGGTAALGCLVKDYFPEPVTVSWNSGALTSGVHTFPAVLQSS
GLYSLSSVVTVPSSSLGTQTYICNVNHKPSNTKVDKKVEPKSCDKTH
TCPPCPAPELLGGPSVFLFPPKPKDTLMISRTPEVTCVVVDVSHEDP
EVKFNWYVDGVEVHNAKTKPREEQYNSTYRVVSVLTVLHQDWLNGKE
YKCKVSNKALPAPIEKTISKAKGQPREPQVYTLPPCRDELTKNQVSL
WCLVKGFYPSDIAVEWESNGQPENNYKTTPPVLDSDGSFFLYSKLTV
DKSRWQQGNVFSCSVLHEALHSHYTQKSLSLSPGK

[0852] SEQ ID NO: 206 is the amino acid sequence defining the 1-68 derived light chain of the 2-30/1-68 antibody 1-68LC

QSALTQPPSVSGSPGQSVTISCTGTSSDVGSYNRVSWYQQPPGTAPK
LMIYEVSNRPSGVPDRFSGSKSGNTASLTISGLQAEDEADYYCSSYT
SSSTYVFGTGTKVTVLGQPKAAPSVTLFPPSSEELQANKATLVCLIS
DFYPGAVTVAWKADSSPVKAGVETTTPSKQSNNKYAASSYLSLTPEQ
WKSHRSYSCQVTHEGSTVEKTVAPTECS

[0853] The 2-30/4-18 bispecific antibody sequence can comprise:

[0854] SEQ ID NO: 207 is the amino acid sequence defining the 2-30 derived heavy chain of the 2-30/4-18 antibody 2-30HC-Hole-Cross

QVQLVESGGGVVQPGRSLRLSCAASGFTFSSYTMHWVRQAPGKGLEW
VAAISYDGNNKYYADSVKGRFTISRDNSKNTLYLQMNSLRAEDTAVY
YCARSILYGGGMDVWGQGTTVTVSSASTAAPSVFIFPPSDEQLKSGT
ASVVCLLNNFYPREAKVQWKVDNALQSGNSQESVTEQDSKDSTYSLS
STLTLSKADYEKHKVYACEVTHQGLSSPVTKSFNRGECDKTHTCPPC
PAPELLGGPSVFLFPPKPKDTLMISRTPEVTCVVVDVSHEDPEVKFN
WYVDGVEVHNAKTKPREEQYNSTYRVVSVLTVLHQDWLNGKEYKCKV
SNKALPAPIEKTISKAKGQPREPQVCTLPPSRDELTKNQVSLSCAVK
GFYPSDIAVEWESNGQPENNYKTTPPVLDSDGSFFLVSKLTVDKSRW
QQGNVFSCSVLHEALHSHYTQKSLSLSPGK

[0855] SEQ ID NO: 208 is the amino acid sequence defining the 2-30 derived light chain of the 2-30/4-18 antibody 2-30VLCH1

DIQLTQSPSSLSASVGDRVTITCRASQGISSYLAWYQQKPGQAPKLL
IYAASTLQSGVPSRFSGSGSGTDFTLTISSLQPEDFATYYCQQLNSY
PLTFGGGTKVEIKSSASTKGPSVFPLAPSSKSTSGGTAALGCLVKDY
FPEPVTVSWNSGALTSGVHTFPAVLQSSGLYSLSSVVTVPSSSLGTQ
TYICNVNHKPSNTKVDKKVEPKSC

[0856] SEQ ID NO: 209 is the amino acid sequence defining the 4-18 derived heavy chain of the 2-30/4-18 antibody 4-18HC-Knob

QVQLVESGGGVVQPGRSLRLSCAASGFTFSSYGMHWVRQAPGKGLEW
VAVISYDGSNKHYADSVKGRFTISRDNSKNTLYLQMNSLRAEDTAVY
YCAKDSGYNYGYSWFDPWGQGTLVTVSSASTKGPSVFPLAPSSKSTS
GGTAALGCLVKDYFPEPVTVSWNSGALTSGVHTFPAVLQSSGLYSLS
SVVTVPSSSLGTQTYICNVNHKPSNTKVDKKVEPKSCDKTHTCPPCP
APELLGGPSVFLFPPKPKDTLMISRTPEVTCVVVDVSHEDPEVKFNW
YVDGVEVHNAKTKPREEQYNSTYRVVSVLTVLHQDWLNGKEYKCKVS
NKALPAPIEKTISKAKGQPREPQVYTLPPCRDELTKNQVSLWCLVKG
FYPSDIAVEWESNGQPENNYKTTPPVLDSDGSFFLYSKLTVDKSRWQ
QGNVFSCSVLHEALHSHYTQKSLSLSPGK

[0857] SEQ ID NO: 210 is the amino acid sequence defining the 4-18 derived light chain of the 2-30/4-18 antibody 4-18LC

SYELTQPPSVSVSPGQTARITCSADALAKQYAYWYQQKPGQAPVLVI
YKDSERPSGIPERFSGSSSGTTVTLTISGVQAEDEADYYCQSTDNSG
TYPNWVFGGGTKLTVLGQPKAAPSVTLFPPSSEELQANKATLVCLIS
DFYPGAVTVAWKADSSPVKAGVETTTPSKQSNNKYAASSYLSLTPEQ
WKSHRSYSCQVTHEGSTVEKTVAPTECS

[0858] The 2-7/4-8(39/51) bispecific antibody sequence can comprise:

[0859] SEQ ID NO: 211 is the amino acid sequence defining the 2-7 derived heavy chain of the 2-7/4-8(39/51) antibody 2-7HC-Hole-Cross

QITLKESGPTLVKPTQTLTLTCTFSGFSLSTSGVGVGWIRQPPGKAL
EWLALIYWDDDKRYSPSLKSRLTITKDTSKNQVVLTMTNMDPVDTAT
YYCAHHKIERIFDYWGQGTLVTVSSASTAAPSVFIFPPSDEQLKSGT
ASVVCLLNNFYPREAKVQWKVDNALQSGNSQESVTEQDSKDSTYSLS
STLTLSKADYEKHKVYACEVTHQGLSSPVTKSFNRGECDKTHTCPPC
PAPELLGGPSVFLFPPKPKDTLMISRTPEVTCVVVDVSHEDPEVKFN
WYVDGVEVHNAKTKPREEQYNSTYRVVSVLTVLHQDWLNGKEYKCKV
SNKALPAPIEKTISKAKGQPREPQVCTLPPSRDELTKNQVSLSCAVK
GFYPSDIAVEWESNGQPENNYKTTPPVLDSDGSFFLVSKLTVDKSRW
QQGNVFSCSVLHEALHSHYTQKSLSLSPGK

[0860] SEQ ID NO: 212 is the amino acid sequence defining the 2-7 derived light chain of the 2-7/4-8(39/51) antibody 2-7VLCH1

QSALAQPASVSGSPGQSITISCTGTSSDVGAYNYVSWYQQHPGKAPK
LMIYDVSKRPSGVSNRFSGSKSGNTASLTISGLQAEDEADYYCSSYT
TSSTVFGGGTKLTVLSSASTKGPSVFPLAPSSKSTSGGTAALGCLVK
DYFPEPVTVSWNSGALTSGVHTFPAVLQSSGLYSLSSVVTVPSSSLG
TQTYICNVNHKPSNTKVDKKVEPKSC

[0861] SEQ ID NO: 213 is the amino acid sequence defining the 4-8(39/51) derived heavy chain of the 2-7/4-8(39/51) antibody 4-8(39/51) HC-Knob

QVQLVQSGAEVKKAGSSVKVSCKASGGTFSSHTITWVRLAPGQGLEW
MGRNIPILGIANYAQKFQGRVTITADKSTSTAYMELSSLRSEDTAVY
YCASLQTVDTAIEKYYGMDVWGQGTTVTVSSASTKGPSVFPLAPSSK
STSGGTAALGCLVKDYFPEPVTVSWNSGALTSGVHTFPAVLQSSGLY
SLSSVVTVPSSSLGTQTYICNVNHKPSNTKVDKKVEPKSCDKTHTCP
PCPAPELLGGPSVFLFPPKPKDTLMISRTPEVTCVVVDVSHEDPEVK
FNWYVDGVEVHNAKTKPREEQYNSTYRVVSVLTVLHQDWLNGKEYKC
KVSNKALPAPIEKTISKAKGQPREPQVYTLPPCRDELTKNQVSLWCL
VKGFYPSDIAVEWESNGQPENNYKTTPPVLDSDGSFFLYSKLTVDKS
RWQQGNVFSCSVLHEALHSHYTQKSLSLSPGK

[0862] SEQ ID NO: 214 is the amino acid sequence defining the 4-8(39/51) derived light chain of the 2-7/4-8(39/51) antibody 4-8LC

SYELTQPPSVSVSPGQTASITCSGDKLGDKYACWYQQKPGQSPVLVI
YQDNKRPSGIPERFSGSNSGNTATLTISGTQAMDEADYYCQAWDSST
AVFGGGTKLTVLGQPKAAPSVTLFPPSSEELQANKATLVCLISDFYP
GAVTVAWKADSSPVKAGVETTTPSKQSNNKYAASSYLSLTPEQWKSH
RSYSCQVTHEGSTVEKTVAPTECS

[0863] The 1-57/1-87 bispecific antibody sequence can comprise:

[0864] SEQ ID NO: 215 is the amino acid sequence defining the 1-57 derived heavy chain of the 1-57/1-87 antibody 1-57HC-Hole-Cross

EVHLVESGGGLVQPGGSLRLSCAASGFTFSDHYMDWVRQAPGKGLEW
VGRTRNKANSYTTEYAASVKGRFTISRDDAKNSLYLQMNSLKTEDTA
VYYCARVHRWAYCINGVCFGAYSDYWGQGTLVTVSSASTAAPSVFIF
PPSDEQLKSGTASVVCLLNNFYPREAKVQWKVDNALQSGNSQESVTE
QDSKDSTYSLSSTLTLSKADYEKHKVYACEVTHQGLSSPVTKSFNRG
ECDKTHTCPPCPAPELLGGPSVFLFPPKPKDTLMISRTPEVTCVVVD
VSHEDPEVKFNWYVDGVEVHNAKTKPREEQYNSTYRVVSVLTVLHQD
WLNGKEYKCKVSNKALPAPIEKTISKAKGQPREPQVCTLPPSRDELT
KNQVSLSCAVKGFYPSDIAVEWESNGQPENNYKTTPPVLDSDGSFFL
VSKLTVDKSRWQQGNVFSCSVLHEALHSHYTQKSLSLSPGK

[0865] SEQ ID NO: 216 is the amino acid sequence defining the 1-57 derived light chain of the 1-57/1-87 antibody 1-57VLCH1

EIVLTQSPGTLSLSPGERATLSCRASQSVSSSYLAWYQQKPGQAPRL
LIYGASSRATGIPDRFSGSGSGTDFTLTISRLEPEDFAVYYCQQYGS
SPSTFGQGTKLEIKSSASTKGPSVFPLAPSSKSTSGGTAALGCLVKD
YFPEPVTVSWNSGALTSGVHTFPAVLQSSGLYSLSSVVTVPSSSLGT
QTYICNVNHKPSNTKVDKKVEPKSC

[0866] SEQ ID NO: 217 is the amino acid sequence defining the 1-87 derived heavy chain of the 1-57/1-87 antibody 1-87HC-Knob

QVQLVQSGAEVKKPGASVKVSCKVSGYTLIELSMHWVRQAPGKGLEW
MGGFDPEDAETIYAQKFQGRVTMTEDTSTDTAYMELSSLRSEDTAVY
YCATGIAVIGPPPSTYYYYGMDVWGQGTTVTVSSASTKGPSVFPLAP
SSKSTSGGTAALGCLVKDYFPEPVTVSWNSGALTSGVHTFPAVLQSS
GLYSLSSVVTVPSSSLGTQTYICNVNHKPSNTKVDKKVEPKSCDKTH
TCPPCPAPELLGGPSVFLFPPKPKDTLMISRTPEVTCVVVDVSHEDP
EVKFNWYVDGVEVHNAKTKPREEQYNSTYRVVSVLTVLHQDWLNGKE
YKCKVSNKALPAPIEKTISKAKGQPREPQVYTLPPCRDELTKNQVSL
WCLVKGFYPSDIAVEWESNGQPENNYKTTPPVLDSDGSFFLYSKLTV
DKSRWQQGNVFSCSVLHEALHSHYTQKSLSLSPGK

[0867] SEQ ID NO: 218 is the amino acid sequence defining the 1-87 derived light chain of the 1-57/1-87 antibody 1-87LC

QSALTQPASVSGSPGQSITISCTGTSSDVGGYNYVSWYQQHPGKAPKLM
IYDVSKRPSGVSNRFSGSKSGNTASLTISGLQAEDEADYYCSSYTSSST
YVFGTGTKVTVLGQPKAAPSVTLFPPSSEELQANKATLVCLISDFYPGA
VTVAWKADSSPVKAGVETTTPSKQSNNKYAASSYLSLTPEQWKSHRSYS
CQVTHEGSTVEKTVAPTECS

[0868] The 1-57/4-8(39/51) bispecific antibody sequence can comprise:

[0869] SEQ ID NO: 219 is the amino acid sequence defining the 1-57 derived heavy chain of the 1-57/4-8(39/51) antibody 1-57HC-Hole-Cross

EVHLVESGGGLVQPGGSLRLSCAASGFTFSDHYMDWVRQAPGKGLEWVG
RTRNKANSYTTEYAASVKGRFTISRDDAKNSLYLQMNSLKTEDTAVYYC
ARVHRWAYCINGVCFGAYSDYWGQGTLVTVSSASTAAPSVFIFPPSDEQ
LKSGTASVVCLLNNFYPREAKVQWKVDNALQSGNSQESVTEQDSKDSTY
SLSSTLTLSKADYEKHKVYACEVTHQGLSSPVTKSFNRGECDKTHTCPP
CPAPELLGGPSVFLFPPKPKDTLMISRTPEVTCVVVDVSHEDPEVKFNW
YVDGVEVHNAKTKPREEQYNSTYRVVSVLTVLHQDWLNGKEYKCKVSNK
ALPAPIEKTISKAKGQPREPQVCTLPPSRDELTKNQVSLSCAVKGFYPS
DIAVEWESNGQPENNYKTTPPVLDSDGSFFLVSKLTVDKSRWQQGNVFS
CSVLHEALHSHYTQKSLSLSPGK

[0870] SEQ ID NO: 220 is the amino acid sequence defining the 1-57 derived light chain of the 1-57/4-8(39/51) antibody 1-57VLCH1

EIVLTQSPGTLSLSPGERATLSCRASQSVSSSYLAWYQQKPGQAPRLLI
YGASSRATGIPDRFSGSGSGTDFTLTISRLEPEDFAVYYCQQYGSSPST
FGQGTKLEIKSSASTKGPSVFPLAPSSKSTSGGTAALGCLVKDYFPEPV
TVSWNSGALTSGVHTFPAVLQSSGLYSLSSVVTVPSSSLGTQTYICNVN
HKPSNTKVDKKVEPKSC

[0871] SEQ ID NO: 221 is the amino acid sequence defining the 4-8(39/51) derived heavy chain of the 1-57/4-8(39/51) antibody 4-8(39/51) HC-Knob

QVQLVQSGAEVKKAGSSVKVSCKASGGTFSSHTITWVRLAPGQGLEWMG
RNIPILGIANYAQKFQGRVTITADKSTSTAYMELSSLRSEDTAVYYCAS
LQTVDTAIEKYYGMDVWGQGTTVTVSSASTKGPSVFPLAPSSKSTSGGT
AALGCLVKDYFPEPVTVSWNSGALTSGVHTFPAVLQSSGLYSLSSVVTV
PSSSLGTQTYICNVNHKPSNTKVDKKVEPKSCDKTHTCPPCPAPELLGG
PSVFLFPPKPKDTLMISRTPEVTCVVVDVSHEDPEVKFNWYVDGVEVHN
AKTKPREEQYNSTYRVVSVLTVLHQDWLNGKEYKCKVSNKALPAPIEKT
ISKAKGQPREPQVYTLPPCRDELTKNQVSLWCLVKGFYPSDIAVEWESN
GQPENNYKTTPPVLDSDGSFFLYSKLTVDKSRWQQGNVFSCSVLHEALH
SHYTQKSLSLSPGK

[0872] SEQ ID NO: 222 is the amino acid sequence defining the 4-8(39/51) derived light chain of the 1-57/4-8(39/51) antibody 4-8LC

SYELTQPPSVSVSPGQTASITCSGDKLGDKYACWYQQKPGQSPVLVIYQ
DNKRPSGIPERFSGSNSGNTATLTISGTQAMDEADYYCQAWDSSTAVFG
GGTKLTVLGQPKAAPSVTLFPPSSEELQANKATLVCLISDFYPGAVTVA
WKADSSPVKAGVETTTPSKQSNNKYAASSYLSLTPEQWKSHRSYSCQVT
HEGSTVEKTVAPTECS

[0873] The 2-7/2-51 bispecific antibody sequence can comprise:

[0874] SEQ ID NO: 223 is the amino acid sequence defining the 2-7 derived heavy chain of the 2-7/2-51 antibody 2-7HC-Hole-Cross

QITLKESGPTLVKPTQTLTLTCTFSGFSLSTSGVGVGWIRQPPGKALEW
LALIYWDDDKRYSPSLKSRLTITKDTSKNQVVLTMTNMDPVDTATYYCA
HHKIERIFDYWGQGTLVTVSSASTAAPSVFIFPPSDEQLKSGTASVVCL
LNNFYPREAKVQWKVDNALQSGNSQESVTEQDSKDSTYSLSSTLTLSKA
DYEKHKVYACEVTHQGLSSPVTKSFNRGECDKTHTCPPCPAPELLGGPS
VFLFPPKPKDTLMISRTPEVTCVVVDVSHEDPEVKFNWYVDGVEVHNAK
TKPREEQYNSTYRVVSVLTVLHQDWLNGKEYKCKVSNKALPAPIEKTIS
KAKGQPREPQVCTLPPSRDELTKNQVSLSCAVKGFYPSDIAVEWESNGQ
PENNYKTTPPVLDSDGSFFLVSKLTVDKSRWQQGNVFSCSVLHEALHSH
YTQKSLSLSPGK

[0875] SEQ ID NO: 224 is the amino acid sequence defining the 2-7 derived light chain of the 2-7/2-51 antibody 2-7VLCH1

QSALAQPASVSGSPGQSITISCTGTSSDVGAYNYVSWYQQHPGKAPKLM
IYDVSKRPSGVSNRFSGSKSGNTASLTISGLQAEDEADYYCSSYTTSST
VFGGGTKLTVLSSASTKGPSVFPLAPSSKSTSGGTAALGCLVKDYFPEP
VTVSWNSGALTSGVHTFPAVLQSSGLYSLSSVVTVPSSSLGTQTYICNV
NHKPSNTKVDKKVEPKSC

[0876] SEQ ID NO: 225 is the amino acid sequence defining the 2-51 derived heavy chain of the 2-7/2-51 antibody 2-51 HC-Knob

QVQLVQSGAEVKKPGASVKVSCKVSGYTLIELSMHWVRQAPGKGLEWMG
GFDPEDVETIYAQQFQGRVTMTEDTSTDTAYMELSSLRSEDTAVYYCAT
GWAYKSTWYFGYWGQGTLVTVSSASTKGPSVFPLAPSSKSTSGGTAALG
CLVKDYFPEPVTVSWNSGALTSGVHTFPAVLQSSGLYSLSSVVTVPSSS
LGTQTYICNVNHKPSNTKVDKKVEPKSCDKTHTCPPCPAPELLGGPSVF
LFPPKPKDTLMISRTPEVTCVVVDVSHEDPEVKFNWYVDGVEVHNAKTK
PREEQYNSTYRVVSVLTVLHQDWLNGKEYKCKVSNKALPAPIEKTISKA
KGQPREPQVYTLPPCRDELTKNQVSLWCLVKGFYPSDIAVEWESNGQPE
NNYKTTPPVLDSDGSFFLYSKLTVDKSRWQQGNVFSCSVLHEALHSHYT
QKSLSLSPGK

[0877] SEQ ID NO: 226 is the amino acid sequence defining the 2-51 derived light chain of the 2-7/2-51 antibody 2-51LC

QSALTQPPSASGSPGQSVTISCTGTSSDVGGYNYVSWYQQHPGKAPKLM
IYEVSKRPSGVPDRFSGSKSGNTASLTVSGLQAEDEADYYCSSYAGSRM
GFGGGTKLTVLGQPKAAPSVTLFPPSSEELQANKATLVCLISDFYPGAV
TVAWKADSSPVKAGVETTTPSKQSNNKYAASSYLSLTPEQWKSHRSYSC
QVTHEGSTVEKTVAPTECS

[0878] The 2-15/4-8(39/51) bispecific antibody sequence can comprise:

[0879] SEQ ID NO: 227 is the amino acid sequence defining the 2-15 derived heavy chain of the 2-15/4-8(39/51) antibody 2-15HC-Hole-Cross

QVQLVQSGAEVKKPGASVRVSCKASGYTFTGYYMHWVRQAPGQGLEWMG
WINPISDGTNYAQKFQGWVTMTRDTSISTVYMELSRLRSDDTAVYYCAR
GGSRCSGGNCYGWAYDAFDIWGQGTMITVSSASTAAPSVFIFPPSDEQL
KSGTASVVCLLNNFYPREAKVQWKVDNALQSGNSQESVTEQDSKDSTYS
LSSTLTLSKADYEKHKVYACEVTHQGLSSPVTKSFNRGECDKTHTCPPC
PAPELLGGPSVFLFPPKPKDTLMISRTPEVTCVVVDVSHEDPEVKFNWY
VDGVEVHNAKTKPREEQYNSTYRVVSVLTVLHQDWLNGKEYKCKVSNKA
LPAPIEKTISKAKGQPREPQVCTLPPSRDELTKNQVSLSCAVKGFYPSD
IAVEWESNGQPENNYKTTPPVLDSDGSFFLVSKLTVDKSRWQQGNVFSC
SVLHEALHSHYTQKSLSLSPGK

[0880] SEQ ID NO: 228 is the amino acid sequence defining the 2-15 derived light chain of the 2-15/4-8(39/51) antibody 2-15VLCH1

QSALTQPASVSGSPGQSITISCTGTSSDVGGYNFVSWYQQHPGKAPKLM
IYDVSKRPSGVSNRFSGSKSGNTASLTISGLQAEDEADCYCSSYTSSST
FVFGTGTKVTVLSSASTKGPSVFPLAPSSKSTSGGTAALGCLVKDYFPE
PVTVSWNSGALTSGVHTFPAVLQSSGLYSLSSVVTVPSSSLGTQTYICN
VNHKPSNTKVDKKVEPKSC

[0881] SEQ ID NO: 229 is the amino acid sequence defining the 4-8(39/51) derived heavy chain of the 2-15/4-8(39/51) antibody 4-8(39/51) HC-Knob

QVQLVQSGAEVKKAGSSVKVSCKASGGTFSSHTITWVRLAPGQGLEWMG
RNIPILGIANYAQKFQGRVTITADKSTSTAYMELSSLRSEDTAVYYCAS
LQTVDTAIEKYYGMDVWGQGTTVTVSSASTKGPSVFPLAPSSKSTSGGT
AALGCLVKDYFPEPVTVSWNSGALTSGVHTFPAVLQSSGLYSLSSVVTV
PSSSLGTQTYICNVNHKPSNTKVDKKVEPKSCDKTHTCPPCPAPELLGG
PSVFLFPPKPKDTLMISRTPEVTCVVVDVSHEDPEVKFNWYVDGVEVHN
AKTKPREEQYNSTYRVVSVLTVLHQDWLNGKEYKCKVSNKALPAPIEKT
ISKAKGQPREPQVYTLPPCRDELTKNQVSLWCLVKGFYPSDIAVEWESN
GQPENNYKTTPPVLDSDGSFFLYSKLTVDKSRWQQGNVFSCSVLHEALH
SHYTQKSLSLSPGK

[0882] SEQ ID NO: 230 is the amino acid sequence defining the 4-8(39/51) derived light chain of the 2-15/4-8(39/51) antibody 4-8LC

SYELTQPPSVSVSPGQTASITCSGDKLGDKYACWYQQKPGQSPVLVIYQ
DNKRPSGIPERFSGSNSGNTATLTISGTQAMDEADYYCQAWDSSTAVFG
GGTKLTVLGQPKAAPSVTLFPPSSEELQANKATLVCLISDFYPGAVTVA
WKADSSPVKAGVETTTPSKQSNNKYAASSYLSLTPEQWKSHRSYSCQVT
HEGSTVEKTVAPTECS

[0883] The 1-57/4-18 bispecific antibody sequence can comprise:

[0884] SEQ ID NO: 231 is the amino acid sequence defining the 1-57 derived heavy chain of the 1-57/4-18 antibody 1-57HC-Hole-Cross

EVHLVESGGGLVQPGGSLRLSCAASGFTFSDHYMDWVRQAPGKGLEWVG
RTRNKANSYTTEYAASVKGRFTISRDDAKNSLYLQMNSLKTEDTAVYYC
ARVHRWAYCINGVCFGAYSDYWGQGTLVTVSSASTAAPSVFIFPPSDEQ
LKSGTASVVCLLNNFYPREAKVQWKVDNALQSGNSQESVTEQDSKDSTY
SLSSTLTLSKADYEKHKVYACEVTHQGLSSPVTKSFNRGECDKTHTCPP
CPAPELLGGPSVFLFPPKPKDTLMISRTPEVTCVVVDVSHEDPEVKFNW
YVDGVEVHNAKTKPREEQYNSTYRVVSVLTVLHQDWLNGKEYKCKVSNK
ALPAPIEKTISKAKGQPREPQVCTLPPSRDELTKNQVSLSCAVKGFYPS
DIAVEWESNGQPENNYKTTPPVLDSDGSFFLVSKLTVDKSRWQQGNVFS
CSVLHEALHSHYTQKSLSLSPGK

[0885] SEQ ID NO: 232 is the amino acid sequence defining the 1-57 derived light chain of the 1-57/4-18 antibody 1-57VLCH1

EIVLTQSPGTLSLSPGERATLSCRASQSVSSSYLAWYQQKPGQAPRLLI
YGASSRATGIPDRFSGSGSGTDFTLTISRLEPEDFAVYYCQQYGSSPST
FGQGTKLEIKSSASTKGPSVFPLAPSSKSTSGGTAALGCLVKDYFPEPV
TVSWNSGALTSGVHTFPAVLQSSGLYSLSSVVTVPSSSLGTQTYICNVN
HKPSNTKVDKKVEPKSC

[0886] SEQ ID NO: 233 is the amino acid sequence defining the 4-18 derived heavy chain of the 1-57/4-18 antibody 4-18HC-Knob

QVQLVESGGGVVQPGRSLRLSCAASGFTFSSYGMHWVRQAPGKGLEWVAV
ISYDGSNKHYADSVKGRFTISRDNSKNTLYLQMNSLRAEDTAVYYCAKDS
GYNYGYSWFDPWGQGTLVTVSSASTKGPSVFPLAPSSKSTSGGTAALGCL
VKDYFPEPVTVSWNSGALTSGVHTFPAVLQSSGLYSLSSVVTVPSSSLGT
QTYICNVNHKPSNTKVDKKVEPKSCDKTHTCPPCPAPELLGGPSVFLFPP
KPKDTLMISRTPEVTCVVVDVSHEDPEVKFNWYVDGVEVHNAKTKPREEQ
YNSTYRVVSVLTVLHQDWLNGKEYKCKVSNKALPAPIEKTISKAKGQPRE
PQVYTLPPCRDELTKNQVSLWCLVKGFYPSDIAVEWESNGQPENNYKTTP
PVLDSDGSFFLYSKLTVDKSRWQQGNVFSCSVLHEALHSHYTQKSLSLSP
GK

[0887] SEQ ID NO: 234 is the amino acid sequence defining the 4-18 derived light chain of the 1-57/4-18 antibody 4-18LC

SYELTQPPSVSVSPGQTARITCSADALAKQYAYWYQQKPGQAPVLVIYKD
SERPSGIPERFSGSSSGTTVTLTISGVQAEDEADYYCQSTDNSGTYPNWV
FGGGTKLTVLGQPKAAPSVTLFPPSSEELQANKATLVCLISDFYPGAVTV
AWKADSSPVKAGVETTTPSKQSNNKYAASSYLSLTPEQWKSHRSYSCQVT
HEGSTVEKTVAPTECS

[0888] The 2-7/1-68 bispecific antibody sequence can comprise:

[0889] SEQ ID NO: 235 is the amino acid sequence defining the 2-7 derived heavy chain of the 2-7/1-68 antibody 2-7HC-Hole-Cross

QITLKESGPTLVKPTQTLTLTCTFSGFSLSTSGVGVGWIRQPPGKALEWL
ALIYWDDDKRYSPSLKSRLTITKDTSKNQVVLTMTNMDPVDTATYYCAHH
KIERIFDYWGQGTLVTVSSASTAAPSVFIFPPSDEQLKSGTASVVCLLNN
FYPREAKVQWKVDNALQSGNSQESVTEQDSKDSTYSLSSTLTLSKADYEK
HKVYACEVTHQGLSSPVTKSFNRGECDKTHTCPPCPAPELLGGPSVFLFP
PKPKDTLMISRTPEVTCVVVDVSHEDPEVKFNWYVDGVEVHNAKTKPREE
QYNSTYRVVSVLTVLHQDWLNGKEYKCKVSNKALPAPIEKTISKAKGQPR
EPQVCTLPPSRDELTKNQVSLSCAVKGFYPSDIAVEWESNGQPENNYKTT
PPVLDSDGSFFLVSKLTVDKSRWQQGNVFSCSVLHEALHSHYTQKSLSLS
PGK

[0890] SEQ ID NO: 236 is the amino acid sequence defining the 2-7 derived light chain of the 2-7/1-68 antibody 2-7VLCH1

QSALAQPASVSGSPGQSITISCTGTSSDVGAYNYVSWYQQHPGKAPKLMI
YDVSKRPSGVSNRFSGSKSGNTASLTISGLQAEDEADYYCSSYTTSSTVF
GGGTKLTVLSSASTKGPSVFPLAPSSKSTSGGTAALGCLVKDYFPEPVTV
SWNSGALTSGVHTFPAVLQSSGLYSLSSVVTVPSSSLGTQTYICNVNHKP
SNTKVDKKVEPKSC

[0891] SEQ ID NO: 237 is the amino acid sequence defining the 1-68 derived heavy chain of the 2-7/1-68 antibody 1-68HC-Knob

QVQLVQSGAEVKKPGASVKVSCKVSGYTLIELSMHWVRQAPGKGLEWMGG
FDPEDAETIYAQKFQGRVTMTEDTSTDTAYMELSSLRSEDTAVYYCATGW
AVAGSSDVWYYYYGMDVWGQGTTVTVSSASTKGPSVFPLAPSSKSTSGGT
AALGCLVKDYFPEPVTVSWNSGALTSGVHTFPAVLQSSGLYSLSSVVTVP
SSSLGTQTYICNVNHKPSNTKVDKKVEPKSCDKTHTCPPCPAPELLGGPS
VFLFPPKPKDTLMISRTPEVTCVVVDVSHEDPEVKFNWYVDGVEVHNAKT
KPREEQYNSTYRVVSVLTVLHQDWLNGKEYKCKVSNKALPAPIEKTISKA
KGQPREPQVYTLPPCRDELTKNQVSLWCLVKGFYPSDIAVEWESNGQPEN
NYKTTPPVLDSDGSFFLYSKLTVDKSRWQQGNVFSCSVLHEALHSHYTQK
SLSLSPGK

[0892] SEQ ID NO: 238 is the amino acid sequence defining the 1-68 derived light chain of the 2-7/1-68 antibody 1-68LC

QSALTQPPSVSGSPGQSVTISCTGTSSDVGSYNRVSWYQQPPGTAPKLMI
YEVSNRPSGVPDRFSGSKSGNTASLTISGLQAEDEADYYCSSYTSSSTYV
FGTGTKVTVLGQPKAAPSVTLFPPSSEELQANKATLVCLISDFYPGAVTV
AWKADSSPVKAGVETTTPSKQSNNKYAASSYLSLTPEQWKSHRSYSCQVT
HEGSTVEKTVAPTECS

[0893] The 4-20/4-18 bispecific antibody sequence can comprise:

[0894] SEQ ID NO: 239 is the amino acid sequence defining the 4-20 derived heavy chain of the 4-20/4-18 antibody 4-20HC-Hole-Cross

QVQLLQSGAEVKKPGASVKVSCKASGYSFTSYYMHWVRQAPGQGLEWMGI
INPSGGGTTYAQKFQGRVTMTRDTSTSTVYMELSSLRSEDTAVYYCARPG
GGSYQEFDYWGQGTLVTVSSASTAAPSVFIFPPSDEQLKSGTASVVCLLN
NFYPREAKVQWKVDNALQSGNSQESVTEQDSKDSTYSLSSTLTLSKADYE
KHKVYACEVTHQGLSSPVTKSFNRGECDKTHTCPPCPAPELLGGPSVFLF
PPKPKDTLMISRTPEVTCVVVDVSHEDPEVKFNWYVDGVEVHNAKTKPRE
EQYNSTYRVVSVLTVLHQDWLNGKEYKCKVSNKALPAPIEKTISKAKGQP
REPQVCTLPPSRDELTKNQVSLSCAVKGFYPSDIAVEWESNGQPENNYKT
TPPVLDSDGSFFLVSKLTVDKSRWQQGNVFSCSVLHEALHSHYTQKSLSL
SPGK

[0895] SEQ ID NO: 240 is the amino acid sequence defining the 4-20 derived light chain of the 4-20/4-18 antibody 4-20VLCH1

DIQMTQSPSSLSASVGDRVTITCRASQSISSYLNWYQQKPGKAPKLLISA
ASSLQSGVPSRFSGSGSGTDFTLTISSLQPEDFATYYCQQSYNTLQVTFG
GGTKVEIKSSASTKGPSVFPLAPSSKSTSGGTAALGCLVKDYFPEPVTVS
WNSGALTSGVHTFPAVLQSSGLYSLSSVVTVPSSSLGTQTYICNVNHKPS
NTKVDKKVEPKSC

[0896] SEQ ID NO: 241 is the amino acid sequence defining the 4-18 derived heavy chain of the 4-20/4-18 antibody 4-18HC-Knob

QVQLVESGGGVVQPGRSLRLSCAASGFTFSSYGMHWVRQAPGKGLEWVAV
ISYDGSNKHYADSVKGRFTISRDNSKNTLYLQMNSLRAEDTAVYYCAKDS
GYNYGYSWFDPWGQGTLVTVSSASTKGPSVFPLAPSSKSTSGGTAALGCL
VKDYFPEPVTVSWNSGALTSGVHTFPAVLQSSGLYSLSSVVTVPSSSLGT
QTYICNVNHKPSNTKVDKKVEPKSCDKTHTCPPCPAPELLGGPSVFLFPP
KPKDTLMISRTPEVTCVVVDVSHEDPEVKFNWYVDGVEVHNAKTKPREEQ
YNSTYRVVSVLTVLHQDWLNGKEYKCKVSNKALPAPIEKTISKAKGQPRE
PQVYTLPPCRDELTKNQVSLWCLVKGFYPSDIAVEWESNGQPENNYKTTP
PVLDSDGSFFLYSKLTVDKSRWQQGNVFSCSVLHEALHSHYTQKSLSLSP
GK

[0897] SEQ ID NO: 242 is the amino acid sequence defining the 4-18 derived light chain of the 4-20/4-18 antibody 4-18LC

SYELTQPPSVSVSPGQTARITCSADALAKQYAYWYQQKPGQAPVLVIYKD
SERPSGIPERFSGSSSGTTVTLTISGVQAEDEADYYCQSTDNSGTYPNWV
FGGGTKLTVLGQPKAAPSVTLFPPSSEELQANKATLVCLISDFYPGAVTV
AWKADSSPVKAGVETTTPSKQSNNKYAASSYLSLTPEQWKSHRSYSCQVT
HEGSTVEKTVAPTECS

[0898] The 2-15 mut/2-51 bispecific antibody sequence can comprise:

[0899] SEQ ID NO: 243 is the amino acid sequence defining the 2-15 mut derived heavy chain of the 2-15 mut/2-51 antibody 2-15HC-Hole-Cross

QVQLVQSGAEVKKPGASVRVSCKASGYTFTGYYMHWVRQAPGQGLEWMGW
INPISDGTNYAQKFQGWVTMTRDTSISTVYMELSRLRSDDTAVYYCARGG
SRCSGGNCYGWAYDAFDIWGQGTMITVSSASTAAPSVFIFPPSDEQLKSG
TASVVCLLNNFYPREAKVQWKVDNALQSGNSQESVTEQDSKDSTYSLSST
LTLSKADYEKHKVYACEVTHQGLSSPVTKSFNRGECDKTHTCPPCPAPEL
LGGPSVFLFPPKPKDTLMISRTPEVTCVVVDVSHEDPEVKFNWYVDGVEV
HNAKTKPREEQYNSTYRVVSVLTVLHQDWLNGKEYKCKVSNKALPAPIEK
TISKAKGQPREPQVCTLPPSRDELTKNQVSLSCAVKGFYPSDIAVEWESN
GQPENNYKTTPPVLDSDGSFFLVSKLTVDKSRWQQGNVFSCSVLHEALHS
HYTQKSLSLSPGK

[0900] SEQ ID NO: 244 is the amino acid sequence defining the 2-15 mut derived Light chain of the 2-15 mut/2-51 antibody 2-15 mutVLCH1

QSALTQPASVSGSPGQSITISCTGTSSDVGGYNFVSWYQQHPGKAPKLMI
YDVSKRPSGVSNRFSGSKSGNTASLTISGLQAEDEADSYCSSYTSSSTFV
FGTGTKVTVLSSASTKGPSVFPLAPSSKSTSGGTAALGCLVKDYFPEPVT
VSWNSGALTSGVHTFPAVLQSSGLYS

[0901] SEQ ID NO: 245 is the amino acid sequence defining the 2-51 derived heavy chain of the 2-15 mut/2-51 antibody 2-51 HC-Knob

QVQLVQSGAEVKKPGASVKVSCKVSGYTLIELSMHWVRQAPGKGLEWMGG
FDPEDVETIYAQQFQGRVTMTEDTSTDTAYMELSSLRSEDTAVYYCATGW
AYKSTWYFGYWGQGTLVTVSSASTKGPSVFPLAPSSKSTSGGTAALGCLV
KDYFPEPVTVSWNSGALTSGVHTFPAVLQSSGLYSLSSVVTVPSSSLGTQ
TYICNVNHKPSNTKVDKKVEPKSCDKTHTCPPCPAPELLGGPSVFLFPPK
PKDTLMISRTPEVTCVVVDVSHEDPEVKFNWYVDGVEVHNAKTKPREEQY
NSTYRVVSVLTVLHQDWLNGKEYKCKVSNKALPAPIEKTISKAKGQPREP
QVYTLPPCRDELTKNQVSLWCLVKGFYPSDIAVEWESNGQPENNYKTTPP
VLDSDGSFFLYSKLTVDKSRWQQGNVFSCSVLHEALHSHYTQKSLSLSPG
K

[0902] SEQ ID NO: 246 is the amino acid sequence defining the 2-51 derived light chain of the 2-15 mut/2-51 antibody 2-51LC

QSALTQPPSASGSPGQSVTISCTGTSSDVGGYNYVSWYQQHPGKAPKLMI
YEVSKRPSGVPDRFSGSKSGNTASLTVSGLQAEDEADYYCSSYAGSRMGF
GGGTKLTVLGQPKAAPSVTLFPPSSEELQANKATLVCLISDFYPGAVTVA
WKADSSPVKAGVETTTPSKQSNNKYAASSYLSLTPEQWKSHRSYSCQVTH
EGSTVEKTVAPTECS

[0903] The 4-20/4-8(39/51) bispecific antibody sequence can comprise:

[0904] SEQ ID NO: 247 is the amino acid sequence defining the 4-20 derived heavy chain of the 4-20/4-8(39/51) antibody 4-20HC-Hole-Cross

QVQLLQSGAEVKKPGASVKVSCKASGYSFTSYYMHWVRQAPGQGLEWMGI
INPSGGGTTYAQKFQGRVTMTRDTSTSTVYMELSSLRSEDTAVYYCARPG
GGSYQEFDYWGQGTLVTVSSASTAAPSVFIFPPSDEQLKSGTASVVCLLN
NFYPREAKVQWKVDNALQSGNSQESVTEQDSKDSTYSLSSTLTLSKADYE
KHKVYACEVTHQGLSSPVTKSFNRGECDKTHTCPPCPAPELLGGPSVFLF
PPKPKDTLMISRTPEVTCVVVDVSHEDPEVKFNWYVDGVEVHNAKTKPRE
EQYNSTYRVVSVLTVLHQDWLNGKEYKCKVSNKALPAPIEKTISKAKGQP
REPQVCTLPPSRDELTKNQVSLSCAVKGFYPSDIAVEWESNGQPENNYKT
TPPVLDSDGSFFLVSKLTVDKSRWQQGNVFSCSVLHEALHSHYTQKSLSL
SPGK

[0905] SEQ ID NO: 248 is the amino acid sequence defining the 4-20 derived light chain of the 4-20/4-8(39/51) antibody 4-20VLCH1

DIQMTQSPSSLSASVGDRVTITCRASQSISSYLNWYQQKPGKAPKLLIS
AASSLQSGVPSRFSGSGSGTDFTLTISSLQPEDFATYYCQQSYNTLQVT
FGGGTKVEIKSSASTKGPSVFPLAPSSKSTSGGTAALGCLVKDYFPEPV
TVSWNSGALTSGVHTFPAVLQSSGLYSLSSVVTVPSSSLGTQTYICNVN
HKPSNTKVDKKVEPKSC

[0906] SEQ ID NO: 249 is the amino acid sequence defining the 4-8(39/51) derived heavy chain of the 4-20/4-8(39/51) antibody 4-8(39/51) HC-Knob

QVQLVQSGAEVKKAGSSVKVSCKASGGTFSSHTITWVRLAPGQGLEWMG
RNIPILGIANYAQKFQGRVTITADKSTSTAYMELSSLRSEDTAVYYCAS
LQTVDTAIEKYYGMDVWGQGTTVTVSSASTKGPSVFPLAPSSKSTSGGT
AALGCLVKDYFPEPVTVSWNSGALTSGVHTFPAVLQSSGLYSLSSVVTV
PSSSLGTQTYICNVNHKPSNTKVDKKVEPKSCDKTHTCPPCPAPELLGG
PSVFLFPPKPKDTLMISRTPEVTCVVVDVSHEDPEVKFNWYVDGVEVHN
AKTKPREEQYNSTYRVVSVLTVLHQDWLNGKEYKCKVSNKALPAPIEKT
ISKAKGQPREPQVYTLPPCRDELTKNQVSLWCLVKGFYPSDIAVEWESN
GQPENNYKTTPPVLDSDGSFFLYSKLTVDKSRWQQGNVFSCSVLHEALH
SHYTQKSLSLSPGK

[0907] SEQ ID NO: 250 is the amino acid sequence defining the 4-8(39/51) derived light chain of the 4-20/4-8(39/51) antibody 4-8LC

SYELTQPPSVSVSPGQTASITCSGDKLGDKYACWYQQKPGQSPVLVIYQ
DNKRPSGIPERFSGSNSGNTATLTISGTQAMDEADYYCQAWDSSTAVFG
GGTKLTVLGQPKAAPSVTLFPPSSEELQANKATLVCLISDFYPGAVTVA
WKADSSPVKAGVETTTPSKQSNNKYAASSYLSLTPEQWKSHRSYSCQVT
HEGSTVEKTVAPTECS

[0908] The 1-57/2-51 bispecific antibody sequence can comprise:

[0909] SEQ ID NO: 251 is the amino acid sequence defining the 1-57 derived heavy chain of the 1-57/2-51 antibody 1-57HC-Hole-Cross

EVHLVESGGGLVQPGGSLRLSCAASGFTFSDHYMDWVRQAPGKGLEWVG
RTRNKANSYTTEYAASVKGRFTISRDDAKNSLYLQMNSLKTEDTAVYYC
ARVHRWAYCINGVCFGAYSDYWGQGTLVTVSSASTAAPSVFIFPPSDEQ
LKSGTASVVCLLNNFYPREAKVQWKVDNALQSGNSQESVTEQDSKDSTY
SLSSTLTLSKADYEKHKVYACEVTHQGLSSPVTKSFNRGECDKTHTCPP
CPAPELLGGPSVFLFPPKPKDTLMISRTPEVTCVVVDVSHEDPEVKFNW
YVDGVEVHNAKTKPREEQYNSTYRVVSVLTVLHQDWLNGKEYKCKVSNK
ALPAPIEKTISKAKGQPREPQVCTLPPSRDELTKNQVSLSCAVKGFYPS
DIAVEWESNGQPENNYKTTPPVLDSDGSFFLVSKLTVDKSRWQQGNVFS
CSVLHEALHSHYTQKSLSLSPGK

[0910] SEQ ID NO: 252 is the amino acid sequence defining the 1-57 derived light chain of the 1-57/2-51 antibody 1-57VLCH1

EIVLTQSPGTLSLSPGERATLSCRASQSVSSSYLAWYQQKPGQAPRLLI
YGASSRATGIPDRFSGSGSGTDFTLTISRLEPEDFAVYYCQQYGSSPST
FGQGTKLEIKSSASTKGPSVFPLAPSSKSTSGGTAALGCLVKDYFPEPV
TVSWNSGALTSGVHTFPAVLQSSGLYSLSSVVTVPSSSLGTQTYICNVN
HKPSNTKVDKKVEPKSC

[0911] SEQ ID NO: 253 is the amino acid sequence defining the 2-51 derived heavy chain of the 1-57/2-51 antibody 2-51 HC-Knob

QVQLVQSGAEVKKPGASVKVSCKVSGYTLIELSMHWVRQAPGKGLEWMG
GFDPEDVETIYAQQFQGRVTMTEDTSTDTAYMELSSLRSEDTAVYYCAT
GWAYKSTWYFGYWGQGTLVTVSSASTKGPSVFPLAPSSKSTSGGTAALG
CLVKDYFPEPVTVSWNSGALTSGVHTFPAVLQSSGLYSLSSVVTVPSSS
LGTQTYICNVNHKPSNTKVDKKVEPKSCDKTHTCPPCPAPELLGGPSVF
LFPPKPKDTLMISRTPEVTCVVVDVSHEDPEVKFNWYVDGVEVHNAKTK
PREEQYNSTYRVVSVLTVLHQDWLNGKEYKCKVSNKALPAPIEKTISKA
KGQPREPQVYTLPPCRDELTKNQVSLWCLVKGFYPSDIAVEWESNGQPE
NNYKTTPPVLDSDGSFFLYSKLTVDKSRWQQGNVFSCSVLHEALHSHYT
QKSLSLSPGK

[0912] SEQ ID NO: 254 is the amino acid sequence defining the 2-51 derived light chain of the 1-57/2-51 antibody 2-51LC

QSALTQPPSASGSPGQSVTISCTGTSSDVGGYNYVSWYQQHPGKAPKLM
IYEVSKRPSGVPDRFSGSKSGNTASLTVSGLQAEDEADYYCSSYAGSRM
GFGGGTKLTVLGQPKAAPSVTLFPPSSEELQANKATLVCLISDFYPGAV
TVAWKADSSPVKAGVETTTPSKQSNNKYAASSYLSLTPEQWKSHRSYSC
QVTHEGSTVEKTVAPTECS

[0913] The 4-20/1-87 bispecific antibody sequence can comprise:

[0914] SEQ ID NO: 255 is the amino acid sequence defining the 4-20 derived heavy chain of the 4-20/1-87 antibody 4-20HC-Hole-Cross

QVQLLQSGAEVKKPGASVKVSCKASGYSFTSYYMHWVRQAPGQGLEWMG
IINPSGGGTTYAQKFQGRVTMTRDTSTSTVYMELSSLRSEDTAVYYCAR
PGGGSYQEFDYWGQGTLVTVSSASTAAPSVFIFPPSDEQLKSGTASVVC
LLNNFYPREAKVQWKVDNALQSGNSQESVTEQDSKDSTYSLSSTLTLSK
ADYEKHKVYACEVTHQGLSSPVTKSFNRGECDKTHTCPPCPAPELLGGP
SVFLFPPKPKDTLMISRTPEVTCVVVDVSHEDPEVKFNWYVDGVEVHNA
KTKPREEQYNSTYRVVSVLTVLHQDWLNGKEYKCKVSNKALPAPIEKTI
SKAKGQPREPQVCTLPPSRDELTKNQVSLSCAVKGFYPSDIAVEWESNG
QPENNYKTTPPVLDSDGSFFLVSKLTVDKSRWQQGNVFSCSVLHEALHS
HYTQKSLSLSPGK

[0915] SEQ ID NO: 256 is the amino acid sequence defining the 4-20 derived light chain of the 4-20/1-87 antibody 4-20VLCH1

DIQMTQSPSSLSASVGDRVTITCRASQSISSYLNWYQQKPGKAPKLLIS
AASSLQSGVPSRFSGSGSGTDFTLTISSLQPEDFATYYCQQSYNTLQVT
FGGGTKVEIKSSASTKGPSVFPLAPSSKSTSGGTAALGCLVKDYFPEPV
TVSWNSGALTSGVHTFPAVLQSSGLYSLSSVVTVPSSSLGTQTYICNVN
HKPSNTKVDKKVEPKSC

[0916] SEQ ID NO: 257 is amino acid sequence defining the 1-87 derived heavy chain of the 4-20/1-87 antibody 1-87HC-Knob

QVQLVQSGAEVKKPGASVKVSCKVSGYTLIELSMHWVRQAPGKGLEWMG
GFDPEDAETIYAQKFQGRVTMTEDTSTDTAYMELSSLRSEDTAVYYCAT
GIAVIGPPPSTYYYYGMDVWGQGTTVTVSSASTKGPSVFPLAPSSKSTS
GGTAALGCLVKDYFPEPVTVSWNSGALTSGVHTFPAVLQSSGLYSLSSV
VTVPSSSLGTQTYICNVNHKPSNTKVDKKVEPKSCDKTHTCPPCPAPEL
LGGPSVFLFPPKPKDTLMISRTPEVTCVVVDVSHEDPEVKFNWYVDGVE
VHNAKTKPREEQYNSTYRVVSVLTVLHQDWLNGKEYKCKVSNKALPAPI
EKTISKAKGQPREPQVYTLPPCRDELTKNQVSLWCLVKGFYPSDIAVEW
ESNGQPENNYKTTPPVLDSDGSFFLYSKLTVDKSRWQQGNVFSCSVLHE
ALHSHYTQKSLSLSPGK

[0917] SEQ ID NO: 258 is the amino acid sequence defining the 1-87 derived light chain of the 4-20/1-87 antibody 1-87LC

QSALTQPASVSGSPGQSITISCTGTSSDVGGYNYVSWYQQHPGKAPKLM
IYDVSKRPSGVSNRFSGSKSGNTASLTISGLQAEDEADYYCSSYTSSST
YVFGTGTKVTVLGQPKAAPSVTLFPPSSEELQANKATLVCLISDFYPGA
VTVAWKADSSPVKAGVETTTPSKQSNNKYAASSYLSLTPEQWKSHRSYS
CQVTHEGSTVEKTVAPTECS

[0918] The 1-57/1-68 bispecific antibody sequence can comprise:

[0919] SEQ ID NO: 259 is the amino acid sequence defining the 1-57 derived heavy chain of the 1-57/1-68 antibody 1-57HC-Hole-Cross

EVHLVESGGGLVQPGGSLRLSCAASGFTFSDHYMDWVRQAPGKGLEWVG
RTRNKANSYTTEYAASVKGRFTISRDDAKNSLYLQMNSLKTEDTAVYYC
ARVHRWAYCINGVCFGAYSDYWGQGTLVTVSSASTAAPSVFIFPPSDEQ
LKSGTASVVCLLNNFYPREAKVQWKVDNALQSGNSQESVTEQDSKDSTY
SLSSTLTLSKADYEKHKVYACEVTHQGLSSPVTKSFNRGECDKTHTCPP
CPAPELLGGPSVFLFPPKPKDTLMISRTPEVTCVVVDVSHEDPEVKFNW
YVDGVEVHNAKTKPREEQYNSTYRVVSVLTVLHQDWLNGKEYKCKVSNK
ALPAPIEKTISKAKGQPREPQVCTLPPSRDELTKNQVSLSCAVKGFYPS
DIAVEWESNGQPENNYKTTPPVLDSDGSFFLVSKLTVDKSRWQQGNVFS
CSVLHEALHSHYTQKSLSLSPGK

[0920] SEQ ID NO: 260 is the amino acid sequence defining the 1-57 derived light chain of the 1-57/1-68 antibody 1-57VLCH1

EIVLTQSPGTLSLSPGERATLSCRASQSVSSSYLAWYQQKPGQAPRLLI
YGASSRATGIPDRFSGSGSGTDFTLTISRLEPEDFAVYYCQQYGSSPST
FGQGTKLEIKSSASTKGPSVFPLAPSSKSTSGGTAALGCLVKDYFPEPV
TVSWNSGALTSGVHTFPAVLQSSGLYSLSSVVTVPSSSLGTQTYICNVN
HKPSNTKVDKKVEPKSC

[0921] SEQ ID NO: 261 is the amino acid sequence defining the 1-68 derived heavy chain of the 1-57/1-68 antibody 1-68HC-Knob

QVQLVQSGAEVKKPGASVKVSCKVSGYTLIELSMHWVRQAPGKGLEWMG
GFDPEDAETIYAQKFQGRVTMTEDTSTDTAYMELSSLRSEDTAVYYCAT
GWAVAGSSDVWYYYYGMDVWGQGTTVTVSSASTKGPSVFPLAPSSKSTS
GGTAALGCLVKDYFPEPVTVSWNSGALTSGVHTFPAVLQSSGLYSLSSV
VTVPSSSLGTQTYICNVNHKPSNTKVDKKVEPKSCDKTHTCPPCPAPEL
LGGPSVFLFPPKPKDTLMISRTPEVTCVVVDVSHEDPEVKFNWYVDGVE
VHNAKTKPREEQYNSTYRVVSVLTVLHQDWLNGKEYKCKVSNKALPAPI
EKTISKAKGQPREPQVYTLPPCRDELTKNQVSLWCLVKGFYPSDIAVEW
ESNGQPENNYKTTPPVLDSDGSFFLYSKLTVDKSRWQQGNVFSCSVLHE
ALHSHYTQKSLSLSPGK

[0922] SEQ ID NO: 262 is the amino acid sequence defining the 1-68 derived light chain of the 1-57/1-68 antibody 1-68LC

QSALTQPPSVSGSPGQSVTISCTGTSSDVGSYNRVSWYQQPPGTAPKLM
IYEVSNRPSGVPDRFSGSKSGNTASLTISGLQAEDEADYYCSSYTSSST
YVFGTGTKVTVLGQPKAAPSVTLFPPSSEELQANKATLVCLISDFYPGA
VTVAWKADSSPVKAGVETTTPSKQSNNKYAASSYLSLTPEQWKSHRSYS
CQVTHEGSTVEKTVAPTECS

[0923] In some embodiments, a bispecific antibody can be generated from any combination of two monoclonal antibodies described herein. In some embodiments, the subject matter disclosed herein related to the DNA sequence encoding a bispecific antibody comprising any SEQ ID NO from 1-262 or a combination of SEQ ID NOs 1-262. In some embodiments, the subject matter disclosed herein related to the RNA sequence encoding a bispecific antibody comprising any SEQ ID NO from 1-262 or a combination of SEQ ID NOs 1-262.

### EXAMPLES

[0924] Examples are provided below to facilitate a more complete understanding of the invention. The following examples illustrate the exemplary modes of making and practicing the invention. However, the scope of the invention is not limited to specific embodiments disclosed in these Examples, which are for purposes of illustration only, since alternative methods can be utilized to obtain similar results.

### Examples for Monoclonal Antibodies

### Example 1—Patient Antibody Response

[0925] By studying 40 COVID-19 patient cases in great detail, it was found that patients with more severe disease develop more robust antibodies in their blood to the coronavirus. These antibodies include antibodies specific to the spike protein trimer. For the disease to be classified as severe, the COVID-19 patients need mechanical ventilation in an intensive care unit and treatment with hydroxychloroquine, remdesivir, and/or tocilizumab. For the disease to be classified as non-severe, the COVID-19 patients do not require intensive care. FIGS. 2A-G show ELISA binding data in which various COVID-19 patient plasma samples, indicated by different colored lines, were tested for their ability to bind to SARS-CoV-2 nucleocapsid antigen (FIGS. 2A and D), SARS-CoV-2 envelope trimer antigen (FIGS. 2B and E), or SARS-CoV envelope trimer antigen (FIGS. 2C and F). This binding assay is used to determine whether the plasma samples contain an element, most likely antibodies, that can interact with SARS-CoV-2 and SARS-CoV antigens, suggesting an immune response to the antigens. Those plasma samples that interact with both SARS-CoV-2 and SARS-CoV antigens indicate potential for utilizing the samples in neutralization of the antigens and the antigen carrying viruses. FIG. 2G shows a plot of the data from FIGS. 2A-F, which illustrates that higher SARS-CoV-2 antibody responses are present in plasma samples of patients with severe COVID-19 as compared to those patients with non-severe COVID-19.

### Example 2—Antibody Responses Correlated Potencies in Neutralizing SARS-CoV-2

[0926] FIGS. 3A-J shows that stronger binding antibody responses correlate well with greater potencies in neutralizing SARS-CoV-2. Neutralization assays in which various COVID-19 patient plasma samples, indicated by different colored lines, were tested for their ability to protect the target cells from infection by SARS-CoV-2 in a single-cycle pseudovirus infectivity assay (FIGS. 3A and D), by SARS-CoV in a single-cycle pseudovirus infectivity assay (FIGS. 3B and E), and by SARS-CoV-2 in a replication competent live virus infectivity assay (FIGS. 3C and F). This assay is used to determine whether the plasma samples contain an element, most likely antibodies, that can effectively block SARS-CoV-2 or SARS-CoV infection. FIG. 3G shows plotting the dilution (ID₅₀) from FIGS. 3A-F at which the plasma inhibits 50% of virus infection. Higher SARS-CoV-2 inhibitory dilutions are present in plasma samples of patients with severe COVID-19, indicating a potentially more potent antibody response in these patients. FIGS. 3H-J show that the IC₅₀ values obtained by pseudovirus neutralization assay correlate well with the IC₅₀ values obtained from live virus neutralization assay (FIG. 311), the dilutions of plasmas achieving half of the readout of OD₄₅₀ values tested by ELISA in FIG. 2 (FIG. 31), and with the OD₄₅₀ values of the plasma binding to S trimer when diluted 400-fold in FIG. 2 (FIG. 3J). The data here indicates that the antibody binding ability to SARS-CoV-2 S trimer in the COVID-19 plasma samples are well correlated with the neutralization ability, suggesting that the single B cells sorted by SARS-CoV-2 S trimer from COVID-19 patients should have neutralization ability in their secreted antibodies.

### Example 3—Schematics for Identifying Potent Neutralizing Antibodies Against COVID-19

[0927] From the COVID-19 patient cases that indicated the most robust antibody responses in the experiments in FIGS. 2 and 3, blood sample was obtained and subjected to the experimental schema depicted in FIGS. 4A-C in order to identify monoclonal antibodies that could powerfully neutralize the SARS-CoV-2 virus. From each blood sample, the antibody-producing cells known as CD27+ memory B cells were isolated. In particular, the subset of cells that could bind the viral spike protein trimer were isolated.

[0928] The experimental protocol can include the following steps. PBMCs from infected individuals were collected and stained with LIVE/DEAD™ Fixable Yellow Dead Cell Stain Kit (Invitrogen, cat: L34959) at room temperature for 20 minutes to exclude dead cells. Then the cells were incubated with 10 μg/ml spike trimer firstly and further an antibody cocktail for identification of SARS-CoV-2 S trimer specific B cells. The cocktail consisted of CD3-PE-CF594(BD Biosciences, cat:562406), CD19-PE-cy7(Biolegend, cat:302216), CD20-APC-cy7(Biolegend, cat:302314), IgM-V450(BD Biosciences, cat:561286), CD27-PerCP-Cy5.5(BD Biosciences, cat:560612) and Anti-His-PE (Biolegend, cat:362603). Spiker trimer-specific single B cells were gated as CD3-CD19 CD27+Spike trimer+ and sorted into Eppendorf® LoBind microcentrifuge tubes (Sigma, cat: Z666505). After antigen-specific CD27+ memory B cell enrichment, 1310 B cells were loaded on 10X Chromium Chips. All of the experimental processes were performed before library preparation in a BSL3-level laboratory. Single-cell lysis and RNA first-strand synthesis was performed using 10X Chromium Single Cell 5′ Library & Gel Bead Kit according to the manufacturer's protocol. The following RNA and VDJ library preparation is performed according to the manufacturer's protocol (Chromium Single Cell V(D)J Reagent Kits, 10X Genomics) in a BSL-2 laboratory. Sequencing was performed on a Hiseq 2500 platform running Rapid SBS Kit V2 2×100 bp kit (Illumina), with a 26×91 pair-end reading mode. Armed with this information, each monoclonal antibody was reconstructed, now over 250 monoclonal antibodies are obtained by this method.

[0929] As shown in FIG. 9, there is a total of 254 monoclonal antibodies (mAbs) currently synthesized and tested. These include binding antibodies, pseudovirus neutralizing mAbs, and live virus neutralizing antibodies. The binding antibodies include 121 spike protein trimer targeting mAbs, 38 RBD-targeting mAbs, and 83 non-RBD-targeting mAbs. The pseudovirus neutralizing mAbs include 52 spike protein trimer-targeting mAbs, 28 RBD-targeting mAbs, and 24 non-RBD-targeting mAbs. The live virus neutralizing antibodies include 32 spike protein targeting mAbs, 13 RBD-targeting mAbs, and 19 non-RBD-targeting mAbs. 217 mAbs were tested for live virus neutralization.

### Example 4

[0930] FIGS. 5A-D show characterization of the initially identified six monoclonal antibodies that were synthesized and purified, including the high binding ability to the SARS-CoV-2 S trimer (FIG. 5A) and to the virus receptor binding domain (FIG. 5B), and the neutralization capacity of the virus with high potency in both pseudovirus (FIG. 5C) and live replication competent virus (FIG. 5D) assays. Each colored line indicates a different monoclonal antibody. The half maximal effective concentration (EC₅₀) tested by ELISA and the half maximal inhibitory concentration (IC₅₀) tested by neutralization assay are presented to the side of each antibody. SARS-CoV antibody CR3022 is a control which can bind to but not neutralize SARS-CoV-2. These six antibodies are specific to SARS-CoV-2 S trimer, and three of them are RBD binders and three non-RBD binders. All of these six antibodies have neutralization activity against SARS-CoV-2 pseudovirus and live viruses and 2-15 is the most potent one. The binding data showed that these antibodies could be divided into at least two groups with different mechanisms in neutralizing the virus.

[0931] In order to determine where on the SAR-CoV-2 envelope these monoclonal antibodies bind, competition ELISA experiments were performed in order to map the epitopes of these new monoclonal antibodies. As shows in FIGS. 6A-F, each antibody was biotinylated, mixed with other serial diluted antibodies and then incubated with the spike protein (S) trimer. The binding of biotinylated antibodies to S trimer with the presence of other monoclonal antibodies was detected by ELISA. Each colored line represents a different monoclonal antibody. Six of the characterized monoclonal antibodies are categorized into two classes: RBD binding (FIGS. 6A-C) and non-RBD binding (FIGS. 6D-F). There is no competition between the two classes of antibodies but within the two classes, providing the possibility for combination of RBD and non-RBD binders against COVID-19 because they have different mechanisms of neutralizing the virus.

### Example 5

[0932] To further characterize the binding affinity of these new monoclonal antibodies, surface plasmon resonance experiments were performed to determine the binding affinity of the most promising monoclonal antibodies to the SARS-CoV-2 spike trimer. As shown in FIGS. 7A-E, each panel represents the binding affinity and binding kinetics of the indicated monoclonal antibody (i.e., 2-4, 2-15, 2-38, etc.) to the SARS-CoV-2 spike timer. The lower KD1 value indicates a higher antibody binding affinity. Colored lines indicate different dilutions of the respective antibody tested.

### Example 6

[0933] FIGS. 8A-D show initial screenings of mAbs that bind and neutralize the SARS-CoV-2 virus. FIG. 8A shows mAbs binding to spike trimer protein. FIG. 8B shows mAbs binding to the receptor-binding domain (RBD). FIG. 8C shows IC₅₀ values for pseudotyped virus infection. FIG. 8D shows percent inhibition values for live virus infection. FIG. 9 shows summary of synthesized antibodies.

### Example 7

[0934] As shown in FIGS. 10A-I, the potent neutralizing mAbs disclosed herein can bind to the receptor binding domain of the spike protein trimer, to the N-terminal domain of the spike protein trimer or to a different epitope on the spike protein trimer. Each colored line shown in FIGS. 10A-I indicates a different monoclonal antibody utilized in an ELISA binding assay. FIGS. 10A, D, and G show binding to spike protein trimer. FIGS. 10B, E, and H show binding to the RBD. FIGS. 10C, F, and I show binding to the NTD. FIGS. 10A-C show binding of mAbs, which potently bind the RBD. FIGS. 10D-F show binding of mAbs, which potently bind the NTD. FIGS. 10G-I show binding of mAb, which bind epitopes other than the RBD or the NTD. Monoclonal antibodies 2-15, 2-7, 1-57, 2-4, 2-38, 1-20, 2-30, and 4-20 specifically target the RBD of the spike protein trimer. They show no binding affinity for the NTD of the spike protein trimer as shown in FIG. 10C. Monoclonal antibodies 4-18, 5-24, 5-7, and 1-68 specifically target the NTD of the spike protein trimer. These antibodies show no binding affinity for the RBD of the spike protein trimer as shown in FIG. 10E. Monoclonal antibodies 2-43, 4-8, 4-19, 2-51, and 2-17 target at least one other epitope on the spike protein trimer. These antibodies do not show binding affinity for the RBD nor for the NTD as shown in FIGS. 10H and I, respectively.

### Example 8

[0935] FIGS. 11A-F show SARS-CoV-2 neutralization activity of select mAbs. FIG. 11A shows neutralization activity of RBD-targeting mAbs neutralizing a pseudovirus infection. The range of IC₅₀ concentrations for these antibodies is from 0.005 μg/ml to 0.512 μg/ml. FIG. 11B shows neutralization activity of NTD-targeting mAbs neutralizing a pseudovirus infection. The range of IC₅₀ concentrations for these antibodies is from 0.013 μg/ml to 0.767 μg/ml. FIG. 11C shows neutralization activity of mAbs, which target epitopes other than the RBD or the NTD, neutralizing a pseudovirus infection. The range of IC₅₀ concentrations for these antibodies is from 0.070 μg/ml to 0.652 μg/ml. FIG. 11D shows neutralization activity of RBD-targeting mAbs neutralizing a live virus infection. The range of IC₅₀ concentrations for these antibodies is from 0.001 μg/ml to 0.103 μg/ml. FIG. 11E shows neutralization activity of NTD-targeting mAbs neutralizing a live virus infection. The range of IC₅₀ concentrations for these antibodies is from 0.011 μg/ml to 0.034 μg/ml. FIG. 11F shows neutralization activity of mAbs, which target epitopes other than the RBD or the NTD, neutralizing a live virus infection. The range of IC₅₀ concentrations for these antibodies is from 0.003 μg/ml to 0.079 μg/ml.

### Example 9

[0936] FIGS. 12A-B show a CryoEM structure of an RBD-targeting monoclonal antibody. FIG. 12A shows a side view of the structure while FIG. 12B shows a top view of the structure. The mAb is shown in blue ribbon directly adjacent to the RBD, which is shown in green ribbon. The CryoEM structure suggests that the mAb targeting the RBD does not directly interact with the NTD, which is shown in brown ribbon.

[0937] FIGS. 13A-B show a CryoEM structure of an NTD-targeting monoclonal antibody. FIG. 13A shows a side view of the structure while FIG. 13B shows a top view of the structure. The mAb is shown in blue ribbon directly adjacent to the NTD, which is shown in brown ribbon. The CryoEM structure suggests that the mAb targeting the NTD does not directly interact with the RBD, which is shown in green ribbon.

[0938] FIG. 14 shows three SARS-CoV-2 neutralizing epitope clusters identified on the spike protein trimer. The NTD cluster is shown in blue ribbon. The RBD is shown in green ribbon. Other color indicate potential neutralizing epitopes on the spike protein, which are different from the NTD and RBD clusters.

### Example 10—Potent Neutralizing Monoclonal Antibodies Directed to Multiple Epitopes on the SARS-CoV-2 Spike

[0939] Abstract

[0940] The SARS-CoV-2 pandemic rages on with devastating consequences on human lives and the global economy. The discovery and development of virus-neutralizing monoclonal antibodies could be one approach to treat or prevent infection by this novel coronavirus. Here we report the isolation of 61 SARS-CoV-2-neutralizing monoclonal antibodies from 5 infected patients hospitalized with severe disease. Among these are 19 antibodies that potently neutralized the authentic SARS-CoV-2 in vitro, 9 of which exhibited exquisite potency, with 50% virus-inhibitory concentrations of 1 to 9 ng/mL. Epitope mapping showed this collection of 19 antibodies to be about equally divided between those directed to the receptor-binding domain (RBD) and those to the N-terminal domain (NTD), indicating that both of these regions at the top of the viral spike are quite immunogenic. In addition, two other powerful neutralizing antibodies recognized quaternary epitopes that are overlapping with the domains at the top of the spike. Cryo-electron microscopy structures of one antibody targeting RBD, a second targeting NTD, and a third bridging RBD and NTD revealed recognition of the closed, “all RBD-down” conformation of the spike. Several of these monoclonal antibodies are promising candidates for clinical development as potential therapeutic and/or prophylactic agents against SARS-CoV-2.

### BACKGROUND

[0941] A novel coronavirus, now termed SARS-CoV-2^{1,2}, has caused nearly 8 million confirmed infections globally, leading to about 450,000 deaths. This pandemic has also put much of the world on pause, with unprecedented disruption of lives and unparalleled damage to the economy. A return to some semblance of normalcy will depend on science to deliver an effective solution, and the scientific community has responded admirably. Drug development is well underway, and vaccine candidates are entering clinical trials. Another promising approach is the isolation of SARS-CoV-2-neutralizing monoclonal antibodies (mAbs) that could be used as therapeutic or prophylactic agents. The primary target for such antibodies is the viral spike, a trimeric protein^{3,4} that is responsible for binding to the ACE2 receptor on the host cell^{1,3,5,6}. The spike protein is comprised of two subunits. The S1 subunit has two major structural elements: RBD and NTD; the S2 subunit mediates virus-cell membrane fusion after the RBD engages ACE2. Reports of discovery of neutralizing mAbs that target the RBD have been published recently⁷⁻¹¹. We now describe our efforts in isolating and characterizing a collection of mAbs that not only target multiple epitopes on the viral spike but also show exquisite potency in neutralizing SARS-CoV-2.

[0942] Patient Selection

[0943] Forty patients with PCR-confirmed SARS-CoV-2 infection were enrolled in an observational cohort study on virus-neutralizing antibodies. Plasma samples from all subjects were first tested for neutralizing activity against SARS-CoV-2 pseudovirus (Wuhan-Hu-1 spike pseudotyped with vesicular stomatitis virus). Widely varying neutralizing titers were observed, with IC50 ranging from a reciprocal plasma dilution of <100 to ˜13,000 (FIG. 15A). Five patients were chosen for mAb isolation because their plasma virus-neutralizing titers were among the highest. The clinical characteristics of these 5 cases are summarized in FIG. 19. In brief, all were severely ill with acute respiratory distress syndrome requiring mechanical ventilation. Their ages ranged from 50 to 71. Two were Hispanic females, two were white males, and one was a black male. One patient died, while the others recovered. Importantly, blood for isolation of SARS-CoV-2 mAbs was obtained on day 18 to 32 post onset of symptoms.

[0944] Monoclonal Antibody Isolation and Construction

[0945] Peripheral blood mononuclear cells from each patient were put through an experimental schema (FIG. 22A) starting with cell sorting by flow cytometry. The sorting strategy focused on live memory B lymphocytes that were CD3-negative, CD19-positive, and CD27-positive (FIG. 22B). The final step focused on those cells that bound the SARS-CoV-2 spike trimer (S trimer)⁴. S trimer-positive memory B cells were enriched (0.4% to 1.4%) in the 5 patients as compared to a normal health donor (0.2%) (FIG. 22C). A total of 602, 325, 14, 147, and 145 such B cells from Patient 1, Patient 2, Patient 3, Patient 4, and Patient 5, respectively, were labelled with a unique hashtag. The cells were then placed into the 10X Chromium (10X Genomics) for single-cell 5′mRNA and V(D)J sequencing to obtain paired heavy (H) and light (L) chain sequences. A careful bioinformatic analysis was carried out on 1,145 paired sequences to downselect “high-confidence” antigen-specific mAbs. A total of 331 mAb sequences were recovered, representing 252 individual clones. Only 6 mAbs were from Patient 3, whereas 44 to 100 mAbs were identified from each of the other patients (FIG. 20). The VH and VL sequences of 252 antibodies (one per clone) were codon-optimized and synthesized, and each VH and VL gene was then cloned into an expression plasmid with corresponding constant region of H chain and L chain of human IgG1, and mAbs were expressed by co-transfection of paired full-length H chain and L chain genes into Expi293 cells. The supernatant from each transfection was collected for the screening assays and antibody purification.

[0946] Monoclonal Antibody Screening

[0947] All 252 transfection supernatants were screened for binding to S trimer and RBD by enzyme-linked immunosorbent assays (ELISAs), as well as for neutralization against SARS-CoV-2 pseudovirus and live virus. These results are graphically represented in FIGS. 15B-E and tabulated in FIG. 20. It was evident that a substantial percentage of the mAbs in the supernatants bound S trimer, and a subset of those bound RBD. Specifically, 121 supernatants were scored as positive for S trimer binding, yielding an overall hit rate of 48%. Of these, 38 were positive for RBD binding while the remaining 83 were negative. It is interesting to note that none of the 13 trimer-specific mAbs from Patient 5 recognized RBD. In the pseudovirus neutralization screen, 61 supernatants were scored as positive, indicating that half of the trimer-specific mAbs were virus neutralizing. In particular, 15 supernatants retained neutralizing activity even when diluted by 1,000-fold or more. In the screen for neutralization against SARS-CoV-2 (strain USA-WA1/2020), 41 supernatants were scored as positive, including 10 that neutralized the virus completely (+++). Overall, this screening strategy was quite effective in picking up neutralizing mAbs (vertical lines and labelled antibodies at the bottom of FIG. 15B) that were later identified as potent.

[0948] Sequence Analysis of S Trimer-Specific Monoclonal Antibodies

[0949] Of the 121 mAbs that bound S trimer, 88% were IgG isotype, with IgG1 being predominant (FIGS. 23A-D). Small numbers of antibodies of IgM and IgA isotypes were also found. Comparison to the IgG repertoire of three healthy human donors¹², a statistically significant over-representation of IGHV3-30, IGKV3-20, and IGHJ6 genes was observed for this collection of SARS-CoV-2 mAbs (FIG. 23E). A longer CDRH3 length was also noted (FIG. 23F). Interestingly, the average percentages of somatic hypermutation in VH and VL were 2.1 and 2.5, respectively, which were significantly lower than those found in healthy individuals (FIG. 23G) and remarkably close to germline sequences.

[0950] Antigen Binding and Virus Neutralization

[0951] Since the screening for pseudovirus neutralization was performed quantitatively with serial dilutions of the transfection supernatants, we plotted in FIG. 24 the best-fit neutralization curves for 130 samples that were positive in at least one of the screens shown in FIG. 15B. Most were non-neutralizing or weakly neutralizing, but 18 showed evidently better potency. One additional supernatant was initially missed in the pseudovirus screen (Patient 1 in FIG. 24) but was later found to be a potent neutralizing mAb. Together, these 19 mAbs were purified from transfection supernatants and further characterized for their binding and neutralization properties. As shown in FIGS. 16A, D, and G, all but one (2-43) of the mAbs bound the S trimer by a quantitative ELISA. Using two other quantitative ELISAs, nine of the antibodies clearly bound RBD (FIGS. 16B, E, and H), with little or no binding to NTD (FIGS. 16C, F, and I). Eight antibodies bound NTD to varying degrees, with no binding to RBD. Two mAbs bound neither RBD nor NTD, and were therefore categorized as “Others”.

[0952] The pseudovirus neutralization profiles for these purified 19 mAbs are shown in the top portion of FIGS. 16J-L. The RBD-directed antibodies neutralized the pseudovirus with IC₅₀ of 0.005 to 0.512 μg/mL; the NTD-directed antibodies were slightly less potent, with IC₅₀ ranging from 0.013 to 0.767 μg/mL. A common feature of the NTD mAbs was the plateauing of virus neutralization at levels short of 100%. Two antibodies, categorized as “Others”, neutralized with IC₅₀ of 0.071 and 0.652 μg/mL, with mAb 2-51 exhibiting the plateauing effect typical of NTD antibodies. Antibody neutralization of the authentic or live SARS-CoV-2 (strain USA-WA1/2020) was carried out using Vero cells inoculated with a multiplicity of infection of 0.1. As shown in the bottom portion of FIGS. 16M-O, the RBD-directed antibodies again neutralized the virus but with IC₅₀ of 0.0007 to 0.209 μg/mL; the NTD-directed antibodies showed similar potency, with IC₅₀ ranging from 0.007 to 0.109 μg/mL. Here, the plateauing effect seen in the pseudovirus neutralization assay was less apparent. Antibodies 2-43 and 2-51 neutralized the live virus with IC₅₀ of 0.003 and 0.007 μg/mL, respectively. Overall, nine mAbs exhibited exquisite potency in neutralizing authentic SARS-CoV-2 in vitro with IC₅₀ of 0.009 μg/mL or less, including four directed to RBD (2-15, 2-7, 1-57, and 1-20), three to NTD (2-17, 5-24, and 4-8), and two to undetermined regions on the S trimer (2-43 and 2-51). It is remarkable that Patient 2 alone contributed five of the top nine SARS-CoV-2 neutralizing mAbs.

[0953] Epitope Mapping

[0954] All 19 potent neutralizing mAbs (FIG. 16) were further studied in antibody competition experiments to gain insight into their epitopes. In addition, 12 mAbs that bound the S trimer strongly during the initial supernatant screen were also chosen, including 5 that bound RBD (1-97, 2-26, 4-13, 4-24, and 4-29) and 7 that did not bind RBD (1-21, 2-29, 4-15, 4-32, 4-33, 4-41, and 5-45). Four of these mAbs were weak in neutralizing SARS-CoV-2 pseudovirus, and the remaining 8 were non-neutralizing (FIG. 25). First, a total of 16 non-RBD mAbs were evaluated for competition in binding to S trimer by ELISA in a “checkerboard” experiment. The extent of the antibody competition is reflected by the intensity of the heatmap shown in FIG. 17A. There is one large cluster (A) of mAbs that competed with one another, and it partially overlaps a small cluster (B). A third cluster (C) does not overlap at all. Note that all but one of the antibodies in cluster A recognized NTD. Antibody 2-51 is clearly directed to the NTD region even though it could not bind NTD. Moreover, one mAb each from clusters B and C also recognized NTD, thereby indicating that all three clusters are within or near the NTD. One mAb, 1-21, appears to have a unique non-overlapping epitope (epitope region D).

[0955] Second, a similar “checkerboard” competition experiment was carried out by ELISA for 14 of our RBD-directed mAbs plus CR3022^{13,14}. Here, the heatmap shows that there are four epitope clusters that are serially overlapping (FIG. 17B). In FIGS. 17C-D. There is one large cluster (E) that contains mAbs largely capable of blocking ACE2 binding. Furthermore, 4 antibodies in this cluster lost binding to a mutant RBD (L455R, A475R, G502R) that could no longer bind ACE2 (our unpublished findings). Taken together, these results suggest that most of the mAbs in cluster E are directed to the ACE2-binding interface of RBD. The next cluster (F) connects to both cluster E and cluster G, the location of which is defined by its member CR3022¹⁵. Lastly, cluster G overlaps another cluster (H), which includes 1-97 that strongly inhibited the binding of 2-30 to the S trimer. This finding suggests that cluster H may be proximal to one edge of cluster E.

[0956] One potent neutralizing mAb, 2-43, did not bind S trimer by ELISA (FIG. 16) and thus could not be tested in the above competition experiments. However, 2-43 did strongly bind S trimer when expressed on the cell surface as determined by flow cytometry, and this binding was competed out by itself but not by RBD, NTD, ACE2, or the soluble S trimer4 (FIGS. 26A-C). NTD-directed mAbs had only a modest effect on its binding to cell-surface S trimer, but numerous RBD-directed mAbs in cluster E potently blocked the binding of 2-43, demonstrating that this antibody is likely targeting a quaternary epitope on the top of RBD that includes a portion of the interface with ACE2.

[0957] The results in FIGS. 17A-B and FIGS. 26A-C could be represented by two sets of Venn diagrams shown in FIGS. 17C-D. In the non-RBD region, the potent neutralizing mAbs reside exclusively in cluster A and bind a patch on the NTD. Weaker neutralizing mAbs recognize a region at the interface between clusters A and B. In the RBD region, the most potent neutralizing mAbs also group together within one cluster (E). Given that all block ACE2 binding, it is likely they recognize the top of RBD and neutralize the virus by competitive inhibition of receptor binding. Cluster G contains CR3022, a mAb known to be directed to an epitope on a cryptic site on the side of RBD when it is in the “up” position¹⁵. Cluster F is therefore likely situated between the top and this “cryptic” site. The Venn diagram also suggests that cluster H may occupy a different side surface near the top of RBD, perhaps in the region recognized by S3098.

[0958] Cryo-Electron Microscopy

[0959] To further understand antibody recognition of the viral spike and to aid the interpretation of the mapping studies, we determined cryo-EM structures of Fabs from three mAbs in complex with the S trimer4. First, single-particle analysis of the complex with 2-4 Fab (RBD-directed) yielded maps of high quality (FIG. 18a; FIG. 21; FIGS. 27A-F), with the most abundant particle class representing a 3-Fab-per-trimer complex, refined to an overall resolution of 3.2 Å. While density for the constant portion of the Fabs was visible, it was blurred due to molecular motion, and thus only the variable domains were included in the molecular model. Fab of 2-4 bound the spike protein near the apex, with all RBDs in the “down” orientation, and the structure of the antibody-bound spike protein was highly similar to previously published unliganded spike structures in the “all-down” conformation3,4. The 2-4 epitope on RBD has a buried surface area of 751 Å2, sharing 284 Å2 with the interface of ACE2. Detailed interactions between 2-4 and RBD, along with comparative analyses, are discussed and exhibited in FIG. 28. Overall, FIG. 18A shows that neutralization of SARS-CoV-2 by mAb 2-4 likely results from locking RBD in the down conformation while also occluding access to ACE2.

[0960] Second, we also produced 3D cryo-EM reconstructions of the Fab of 4-8 (NTD-directed) in complex with the S trimer (FIG. 21; FIG. 29). Two main particle classes were observed—one for a 3-Fab-bound complex with all RBDs “down” at 3.9 Å resolution (FIG. 18B), and another a 3-Fab-bound complex with one RBD “up” at 4.0 Å resolution (FIG. 30). However, molecular motion prevented visualization of the interaction at high resolution. Nevertheless, the density in the 4-8 map reveals the overall positions of the antibody chains targeting NTD, and helps to anchor the results of the antibody competition experiments. How such binding to the tip of NTD results in SARS-CoV-2 neutralization remains unclear.

[0961] Third, a 7.8 Å resolution reconstructions of the Fab of 2-43 in complex with the S trimer (FIG. 21; FIG. 31) revealed three bound Fabs, each targeting a quaternary epitope on the top of the spike that included the RBD of one protomer and the NTD of another (FIG. 4C), consistent with the epitope mapping results (FIG. 26 and FIG. 17B). Given these findings, the inability of 2-43 to bind S trimer by ELISA is likely an artifact of the assay format, as this mAb did bind the spike expressed on the cell surface and in the cryo-EM study. FIG. 18C suggests that 2-43 could block SARS-CoV-2 infection by occluding the site necessary for ACE2 binding.

[0962] Armed with these three cryo-EM reconstructions, we used the Venn diagrams from FIG. 17B to map the epitopes of many of our SARS-CoV-2 neutralizing mAbs onto the surface of the spike (FIG. 18D). This is obviously a rough approximation since antibody footprints are much larger than the area occupied by the mAb number. However, the spatial relationship of the antibody epitopes should be reasonably represented by FIG. 18D.

### DISCUSSION

[0963] We have discovered a collection of SARS-CoV-2-neutralizing mAbs that are not only potent but also diverse. Nine of these antibodies can neutralize the authentic virus in vitro at concentrations of 9 ng/mL of less (FIG. 16B), including 4 directed to RBD, 3 directed to NTD, and 2 to quaternary epitopes nearby. Surprisingly, many of the these mAbs have V(D)J sequences close to germline sequences, without extensive somatic hypermutations (FIG. 23E), a finding that bodes well for vaccine development. Our most potent RBD-specific mAbs (e.g., 2-15, 2-7, 1-57, and 1-20) compare favorably with such antibodies recently reported^{7,8,10,16-20} including those with high potency^{9,11,21,22}. It appears from the epitope mapping studies that mAbs directed to the top of RBD strongly compete with ACE2 binding and potently neutralize the virus, whereas those directed to the side surfaces of RBD do not compete with ACE2 and neutralize less potently (FIGS. 3B and 4D). Our collection of non-RBD neutralizing mAbs is unprecedented in that such antibodies only have been sporadically reported and only with substantially lower potencies²²⁻²⁴. The most potent of these mAbs are directed to (e.g., 2-17, 5-24, and 4-8) or overlapping with (2-51) a patch on the NTD (FIGS. 3B and 4D). It is unclear how NTD-directed mAbs block SARS-CoV-2 infection and why their neutralization profiles are different from those of RBD-directed antibodies (FIG. 16B). Nevertheless, vaccine strategies that do not include NTD will be unable to induce an important class of virus-neutralizing antibodies.

[0964] The isolation of two mAbs (2-43 and 2-51) directed to epitopes that do not map to RBD and NTD is also unprecedented. Cryo-EM of 2-43 bound to the S trimer has confirmed its epitope as quaternary in nature, crossing from the top of RBD to the top of an adjacent NTD (FIG. 18C). It will be equally informative to understand the epitope of 2-51 as well. In this study, we also show the first evidence by cryo-EM for a neutralizing mAb (4-8) bound to the NTD of the viral spike (FIG. 18B), as well as another high-resolution structure of a mAb (2-4) bound to RBD (FIG. 18A). Collectively, these findings will contribute to the understanding of how antibodies bind and neutralize SARS-CoV-2.

[0965] The potency and diversity of our SARS-CoV-2-neutralizing mAbs are likely attributable to patient selection. Previously, we observed that infected individuals with severe disease developed a more robust virus-neutralizing antibody response²⁵. If Patient 2 had not been included, five of the top neutralizing mAbs would be lost. The diversity of our antibodies is also attributable, in part, to the choice of using the S trimer to sort from memory B cells, while most groups focused on the use of RBD^{7,9-11,16-19,21}. The characterization of this diverse collection of mAbs has allowed us to observe that all potent SARS-CoV-2-neutralizing antibodies described to date are directed to the top of the viral spike. RBD and NTD are, no doubt, quite immunogenic. Neutralizing antibodies to the stem region of the S trimer remain to be discovered. In conclusion, we believe several of our monoclonal antibodies with exquisite virus-neutralizing activity are promising candidates for development as modalities to treat or prevent SARS-CoV-2 infection.

[0966] Methods

[0967] Expression and Purification of SARS-CoV-2 Proteins

[0968] The mammalian expression vector that encodes the ectodomain of the SARS-CoV-2 S trimer and the vector encoding RBD fused with SD1 at the N-terminus and an HRV-3C protease cleavage site followed by a mFc tag and an 8xHis tag at the C-terminus were kindly provided by Jason McLellan⁴. SARS-CoV-2 NTD (aa1-290) with an HRV-3C protease cleavage site, a mFc tag, and an 8xHis tag at the C-terminus was also cloned into mammalian expression vector pCAGGS. Each expression vector was transiently transfected into Expi293 cells using 1 mg/mL of polyethylenimine (Polysciences). Five days post transfection, the S trimer was purified using Strep-Tactin XT Resin (Zymo Research), and the RBD-mFc and NTD-mFc were purified using protein A agarose (ThermoFisher Scientific). In order to obtain RBD-SD1 and NTD, the mFc and 8xHis tags at the C-terminus were removed by HRV-3C protease (Millipore-Sigma) and then purified using Ni-NTA resin (Invitrogen) followed by protein A agarose.

[0969] Sorting for S Trimer-Specific B cells and Single-Cell BCR Sequencing

[0970] Peripheral blood mononuclear cells from five patients and one healthy donor were stained with LIVE/DEAD™ Fixable Yellow Dead Cell Stain Kit (Invitrogen) at ambient temperature for 20 mins, followed by washing with RPMI-1640 complete medium and incubation with 10 μg/mL of S trimer at 4° C. for 45 mins. Afterwards, the cells were washed again and incubated with a cocktail of flow cytometry and hashtag antibodies, containing CD3 PE-CF594 (BD Biosciences), CD19 PE-Cy7 (Biolegend), CD20 APC-Cy7 (Biolegend), IgM V450 (BD Biosciences), CD27 PerCP-Cy5.5 (BD Biosciences), anti-His PE (Biolegend), and human Hashtag 3 (Biolegend) at 4° C. for 1 hr. Stained cells were then washed, resuspended in RPMI-1640 complete medium and sorted for S trimer-specific memory B cells (CD3-CD19+CD27+S trimer+ live single lymphocytes). The sorted cells were mixed with mononuclear cells from the same donor, labeled with Hashtag 1, and loaded into the 10X Chromium chip of the 5′ Single Cell Immune Profiling Assay (10X Genomics) at the Columbia University Human Immune Monitoring Core (HIMC; RRID:SCR 016740). The library preparation and quality control were performed according to manufacturer's protocol and sequenced on a NextSeq 500 sequencer (Illumina).

[0971] Identification of S Trimer-Specific Antibody Transcripts

[0972] For each sample, full-length antibody transcripts were assembled using the VDJ module in Cell Ranger (version 3.1.0, 10X Genomics) with default parameters and the GRCh38 genome as reference. To identify cells from the antigen sort, we first used the count module in Cell Ranger to calculate copies of all hashtags in each cell from the Illumina NGS raw reads. High confidence antigen-specific cells were identified as follows. Briefly, based on the copy numbers of the hashtags observed, a cell must contain more than 100 copies of the antigen sort-specific hashtag to qualify as an antigen-specific cell. Because hashtags can fall off from cells and bind to cells from a different population in the sample mixture, each cell usually has both sorted and spiked-in-specific hashtags. To enrich for true antigen-specific cells, the copy number of the specific hashtag has to be at least 1.5×higher than that of the non-specific hashtag. Low quality cells were identified and removed using the cell-calling algorithm in Cell Ranger. Cells that do not have productive H and L chain pairs were excluded. If a cell contains more than two H or/and L chain transcripts, the transcripts with less than 3 unique molecular identifiers were removed. Cells with identical H and L chain sequences, which may have resulted from mRNA leakage, were merged into one cell. Additional filters were applied to remove low quality cells and/or transcripts in the antibody gene annotation process.

[0973] Antibody Transcript Annotation and Selection Criteria

[0974] Antigen-specific antibody transcripts were processed using our bioinformatics pipeline SONAR for quality control and annotation²⁶. Briefly, V(D)J genes were assigned for each transcript using BLAST²⁷ with customized parameters against a germline gene database obtained from the international ImMunoGeneTics information system (IMGT) database^{26,28}. Based on BLAST alignments of V and J regions, CDR3 was identified using the conserved second cysteine in the V region and WGXG (H chain) or FGXG (L chain) motifs in the J region (X represents any amino acid). For H chain transcripts, the constant domain 1 (CH1) sequences were used to assign isotype using BLAST with default parameters against a database of human CH1 genes obtained from IMGT. A BLAST E-value threshold of 1E-6 was used to find significant isotype assignments, and the CH1 allele with the lowest E-value was used. Sequences other than the V(D)J region were removed and transcripts containing incomplete V(D)J or/and frame shift were excluded. We then aligned each of the remaining transcripts to the assigned germline V gene using CLUSTALO²⁹ and calculated the somatic hypermutation level.

[0975] To select representative antibodies for functional characterization, we first clustered all antibodies using USEARCH³⁰ with the following criteria: identical heavy chain V and J gene assignments, the same length of CDRH3, and CDRH3 identity higher than 0.9. For each cluster, cells with the same light chain V and J gene assignments were grouped into a clone. All clone assignments were manually checked. We then calculated the clonal size for each clone, and one H and L chain pair per clone was chosen for antibody synthesis. For clones with multiple members, the member with the highest somatic hypermutation level was chosen for synthesis. For cells having multiple high quality H or L chains, which may be from doublets, we synthesized all H and L chain combinations.

[0976] Analysis of S Trimer-Specific Antibody Repertoire

[0977] Because 88% of the S trimer-specific antibodies were IgG isotype, we therefore compared the repertoire features to IgG repertoires from three healthy donors³¹ (17,243 H chains, 27,575 kappa L chains, 20,889 lambda L chains). The repertoire data from the three healthy donors were combined and annotated using SONAR with the same process as above.

[0978] Antibody Expression and Purification

[0979] For each antibody, variable genes were optimized for human cell expression and synthesized by GenScript. VH and VL were inserted separately into plasmids (gWiz or pcDNA3.4) that encode the constant region for H chain and L chain. Monoclonal antibodies were expressed in Expi293 (ThermoFisher, A14527) by co-transfection of H chain and L chain expressing plasmids using polyethylenimine and culture in 37° C. shaker at 125 RPM and 8% CO2. On day 3 post transfection, 400 μL of supernatant were collected for screening for binding to S trimer and RBD by ELISA, and for neutralization of SARS-CoV-2 pseudovirus and authentic virus. Supernatants were also collected on day 5 for antibody purification by rProtein A Sepharose (GE, 17-1279-01) affinity chromatography.

[0980] Production of Pseudoviruses

[0981] Recombinant Indiana VSV (rVSV) expressing SARS-CoV-2 spike was generated as previously described32,33. HEK293T cells were grown to 80% confluency before transfection with pCMV3—SARS-CoV-2-spike (Sino Biological) using FuGENE 6 (Promega). Cells were cultured overnight at 37° C. with 5% CO2. The next day, medium was removed and VSV-G pseudotyped ΔG-luciferase (G*ΔG-luciferase, Kerafast) was used to infect the cells in DMEM at a MOI of 3 for 1 hr before washing the cells with 1X DPBS three times. DMEM supplemented with 2% fetal bovine serum and 100 I.U./mL of penicillin and 100 μg/mL of streptomycin were added to the inoculated cells, which were cultured overnight as described above. The supernatant was harvested the following day and clarified by centrifugation at 300 g for 10 mins before aliquoting and storing at −80° C.

[0982] Pseudovirus Neutralization

[0983] Neutralization assays were performed by incubating pseudoviruses with serial dilutions of heat inactivated plasma together with supernatant or purified antibodies, and scored by the reduction in luciferase gene expression. In brief, Vero E6 cells (ATCC) were seeded in a 96-well plate at a concentration of 2×104 cells per well. Pseudoviruses were incubated the next day with serial dilutions of the test samples in duplicate or triplicate for 30 mins at 37° C. The mixture was added to cultured cells and incubated for an additional 24 hrs. The luminescence was measured by Britelite plus Reporter Gene Assay System (PerkinElmer). IC₅₀ was defined as the dilution at which the relative light units were reduced by 50% compared with the virus control wells (virus+cells) after subtraction of the background in the control groups with cells only. The IC50 values were calculated using non-linear regression in GraphPad Prism 8.0.

[0984] Authentic SARS-CoV-2 Neutralization

[0985] Supernatants containing expressed mAbs were diluted 1:10 and 1:50 in EMEM with 7.5% inactivated fetal calf serum and incubated with authentic SARS-CoV-2 (strain USA-WA1/2020; MOI 0.1) for 1 hr at 37° C. Post-incubation, the mixture was transferred onto a monolayer of Vero E6 cells that was cultured overnight. After incubation of the cells with the mixture for 70 hrs at 37° C., cytopathic effects (CPE) caused by the infection were scored for each well from 0 to 4 to indicate the degree of virus inhibition. Semi-quantitative representation of the inhibition for each antibody-containing supernatant at a dilution of 1:50 is shown in the lowest panel of FIG. 15B with neutralization levels ranging from (−) for none to (+++) for complete neutralization.

[0986] An end-point dilution assay in a 96-well plate format was performed to measure the neutralization activity of select purified mAbs. In brief, each antibody was serially diluted (5-fold dilutions) starting at 20 μg/mL. Triplicates of each mAb dilution were incubated with SARS-CoV-2 at aMOI of 0.1 in EMEM with 7.5% inactivated fetal calf serum for 1 hr at 37° C. Post incubation, the virus-antibody mixture was transferred onto a monolayer of Vero-E6 cells grown overnight. The cells were incubated with the mixture for 70 hrs. CPE were visually scored for each well in a blinded fashion by two independent observers. The results were then converted into percentage neutralization at a given mAb concentration, and the averages ±SEM were plotted using a five-parameter dose-response curve in GraphPad Prism 8.0.

[0987] Epitope Mapping by ELISA

[0988] 50 ng/well of S trimer, 50 ng/well of RBD, and 100 ng/well of NTD were coated on ELISA plates at 4° C. overnight. The ELISA plates were then blocked with 300 μL of blocking buffer (1% BSA and 10% bovine calf serum (BCS) (Sigma) in PBS at 37° C. for 2 hrs. Afterwards, supernatants from the antibody transfection or purified antibodies were serially diluted using dilution buffer (1% BSA and 20% BCS in PBS), incubated at 37° C. for 1 hr. Next, 100 μL of 10,000-fold diluted Peroxidase AffiniPure goat anti-human IgG (H+L) antibody (Jackson ImmunoResearch) were added into each well and incubated for 1 hr at 37° C. The plates were washed between each step with PBST (0.5% Tween-20 in PBS). Finally, the TMB substrate (Sigma) was added and incubated before the reaction was stopped using 1M sulfuric acid. Absorbance was measured at 450 nm.

[0989] For the competition ELISA, purified mAbs were biotin-labeled using One-Step Antibody Biotinylation Kit (Miltenyi Biotec) following manufacturer recommendations and purified using 40K MWCO Desalting Column (ThermoFisher Scientific). 50 μL of serially diluted competitor antibodies were added into S trimer-precoated ELISA plates, followed by 50 μL of biotinylated antibodies at a concentration that achieves an OD450 reading of 1.5 in the absence of competitor antibodies. Plates were incubated at 37° C. for 1 hr, and 100 μL of 500-fold diluted Avidin-HRP (ThermoFisher Scientific) were added into each well and incubated for another 1 hr at 37° C. The plates were washed by PBST between each of the previous steps. The plates were developed afterwards with TMB and absorbance was read at 450 nm after the reaction was stopped.

[0990] For the ACE2 competition ELISA, 100 ng of ACE2 protein (Abcam) was immobilized on the plates at 4° C. overnight. The unbound ACE2 was washed away by PBST and then the plates were blocked. After washing, 100 ng of S trimer in 50 μL of dilution buffer was added into each well, followed by adding another 50 μL of serially diluted competitor antibodies and then incubating the plates at 37° C. for 1 hr. The ELISA plates were washed 4 times by PBST and then 100 μL of 2000-fold diluted anti-strep-HRP (Millipore Sigma) were added into each well for another 1 hr at 37° C. The plates were then washed, developed with TMB, and absorbance was read at 450 nm after the reaction was stopped.

[0991] For all the competition ELISA experiments, the relative binding of biotinylated antibodies or ACE2 to the S trimer in the presence of competitors was normalized by comparing to competitor-free controls. Relative binding curve and the area under curve (AUC) were generated by fitting the non-linear five-parameter dose-response curve in GraphPad Prism 8.0.

[0992] Cell-Surface Competition Binding Assay

[0993] Expi293 cells were co-transfected with vectors encoding pRRL-cPPT-PGK-GFP (Addgene) and pCMV3-SARS-CoV-2 (2019-nCoV) Spike (Sino Biological) at a ratio of 1:1. Two days after transfection, cells were incubated with a mixture of biotinylated mAb 2-43 (0.25 μg/mL) and serially diluted competitor antibodies at 4° C. for 1 hr. Then 100 μL of diluted APC-streptavidin (Biolegend) were added to the cells and incubated at 4° C. for 45 mins. Cells were washed 3 times with FACS buffer before each step. Finally, cells were resuspended and 2-43 binding to cell-surface S trimer was quantified on LSRII flow cytometer (BD Biosciences). The mean fluorescence intensity of APC in GFP-positive cells was analyzed using FlowJo and the relative binding of 2-43 to S trimer in the presence of competitors was calculated as the percentage of the mean fluorescence intensity compared to that of the competitor-free controls.

[0994] Cryo-EM Data Collection and Processing

[0995] SARS-CoV-2 S trimer at a final concentration of 2 mg/ml was incubated with 6-fold molar excess per spike monomer of the antibody Fab fragments for 30 mins in 10 mM Tris-HCl, 150 mM NaCl, and 0.005% n-Dodecyl-β-D-maltoside (DDM). 2 μL of sample were incubated on C-flat 1.2/1.3 carbon grids for 30 secs and vitrified using a Leica EM GP Plunge Freezer. Data were collected on a Titan Krios electron microscope operating at 300 kV equipped with a Gatan K3 direct detector and energy filter using the Leginon software package34. A total electron fluence of 51.3 e/Å2 was fractionated over 40 frames, with a total exposure time of 2 secs. A magnification of 81,000×resulted in a pixel size of 1.058 Å, and a defocus range of −0.4 to −3.5 μm was used. All processing was done using cryoSPARC v2.14.235. Raw movies were aligned and dose-weighted using patch motion correction, and the CTF was estimated using patch CTF estimation. A small subset of approximately 200 micrographs were picked using blob picker, followed by 2D classification and manual curation of particle picks, and used to train a Topaz neural network³⁶. This network was then used to pick particles from the remaining micrographs, which were extracted with a box size of 384 pixels. For the Fab 2-4 dataset, 2D classification followed by ab initio modelling and 3D heterogeneous refinement revealed 83,927 particles with three 2-4 Fabs bound, one to each RBD. Our construction of these particles using Non-Uniform Refinement with imposed C3 symmetry resulted in a 3.6 Å map, as determined by the gold standard FSC. Given the relatively low resolution of the RBD-Fab interface, masked local refinement was used to obtain a 3.5 Å map with significantly improved density. A masked local refinement of the remainder of the S timer resulted in a 3.5 Å reconstruction. These two local refinements were aligned and combined using the vop maximum function in UCSF Chimera³⁷. This was repeated for the half maps, which were used, along with the refinement mask from the global Non-Uniform refinement, to calculate the 3DFSC38 and obtain an estimated resolution of 3.2 Å. All maps have been submitted to the EMDB with the ID EMD-22156. For the Fab 4-8 dataset, image preprocessing and particle picking was performed as above. 2D classification, ab initio modelling, and 3D heterogeneous classification revealed 47,555 particles with 3 Fabs bound, one to each NTD and with all 3 RBDs in the down conformation. While this particle stack was refined to 3.9 Å using Non-Uniform refinement with imposed C3 symmetry, significant molecular motion prevented the visualization of the Fab epitope at high resolution (EMD-22159). In addition, 105,278 particles were shown to have 3 Fabs bound, but with 1 RBD in the up conformation. These particles were refined to 4.0 Å using Non-Uniform refinement with Cl symmetry (EMD-22158), and suffered from the same conformational flexibility as the all-RBD-down particles. This flexibility was visualized using 3D variability analysis in cryoSPARC. For the Fab 2-43 dataset, which was collected at an electron fluence of 53.4 e/Å2, image preprocessing and particle picking was performed as above, save that motion correction was performed using MotionCor239. 2D classification, ab initio modelling, and 3D heterogeneous classification revealed 18,884 particles with 3 Fabs bound, which was refined to 7.8 Å resolution 601 (EMD-22157).

[0996] Cryo-EM Model Fitting

[0997] An initial homology model of the 2-4 Fab was built using Schrodinger Release 2020-2: BioLuminate⁴⁰. The RBD was initially modeled using the coordinates from PDB ID 6W41. The remainder of the S timer was modeled using the coordinates from PDB ID 6VSB. These models were docked into the consensus map using Chimera. The model was then fitted interactively using ISOLDE 1.0b541 and COOT 0.8.9.242, and using real space refinement in Phenix 1.1843. In cases where side chains were not visible in the experimental data, they were truncated to alanine. Validation was performed using Molprobity⁴⁴ and EMRinger⁴⁵. The model was submitted to the PDB with the ID 6XEY. Figures were prepared using ChimeraX⁴⁶.

### REFERENCES FOR EXAMPLE 10

[0998] 1. Zhou, P. et al. A pneumonia outbreak associated with a new coronavirus of probable bat 277 origin. Nature 579, 270-273, doi:10.1038/s41586-020-2012-7 (2020).
[0999] 2. Wang, C., Horby, P. W., Hayden, F. G. & Gao, G. F. A novel coronavirus outbreak of global 279 health concern. Lancet 395, 470-473, doi:10.1016/S0140-6736(20)30185-9 (2020).
[1000] 3. Walls, A. C. et al. Structure, Function, and Antigenicity of the SARS-CoV-2 Spike 281 Glycoprotein. Cell 181, 281-292 e286, doi:10.1016/j.cell.2020.02.058 (2020).
[1001] 4. Wrapp, D. et al. Cryo-EM structure of the 2019-nCoV spike in the prefusion conformation. 283 Science 367, 1260-1263, doi:10.1126/science.abb2507 (2020).
[1002] 5. Hoffmann, M. et al. SARS-CoV-2 Cell Entry Depends on ACE2 and TMPRSS2 and Is Blocked by a Clinically Proven Protease Inhibitor. Cell 181, 271-280 e278, doi:10.1016/j.cell.2020.02.052 (2020).
[1003] 6. Wang, Q. et al. Structural and Functional Basis of SARS-CoV-2 Entry by Using Human ACE2. Cell 181, 894-904 e899, doi:10.1016/j.cell.2020.03.045 (2020).
[1004] 7. Ju, B. et al. Human neutralizing antibodies elicited by SARS-CoV-2 infection. Nature, doi:10.1038/s41586-020-2380-z (2020).
[1005] 8. Pinto, D. et al. Cross-neutralization of SARS-CoV-2 by a human monoclonal SARS-CoV antibody. Nature, doi:10.1038/s41586-020-2349-y (2020).
[1006] 9. Cao, Y. et al. Potent neutralizing antibodies against SARS-CoV-2 identified by high-throughput single-cell sequencing of convalescent patients' B cells. Cell, doi:10.1016/j.cell.2020.05.025 (2020).
[1007] 10. Wu, Y. et al. A noncompeting pair of human neutralizing antibodies block COVID-19 virus binding to its receptor ACE2. Science 368, 1274-1278, doi:10.1126/science.abc2241 (2020).
[1008] 11. Hansen, J. et al. High-Throughput Effort Using Both Humanized Mice and Convalescent Humans Yields SARS-CoV-2 Antibody Cocktail. Science, doi:in press (2020).
[1009] 12. Sheng, Z. et al. Gene-Specific Substitution Profiles Describe the Types and Frequencies of Amino Acid Changes during Antibody Somatic Hypermutation. Front Immunol 8, 537, doi:10.3389/fimmu.2017.00537 (2017).
[1010] 13. ter Meulen, J. et al. Human monoclonal antibody combination against SARS coronavirus: synergy and coverage of escape mutants. Plos Med 3, e237, doi:10.1371/journal.pmed.0030237 (2006).
[1011] 14. Tian, X. et al. Potent binding of 2019 novel coronavirus spike protein by a SARS coronavirus-specific human monoclonal antibody. Emerg Microbes Infect 9, 382-385, 309doi:10.1080/22221751.2020.1729069 (2020).
[1012] 15. Yuan, M. et al. A highly conserved cryptic epitope in the receptor binding domains of SARS-CoV-2 and SARS-CoV. Science 368, 630-633, doi:10.1126/science.abb7269 (2020).
[1013] 16. Rogers, T. F. et al. Rapid isolation of potent SARS-CoV-2 neutralizing antibodies and protection in a small animal model. bioRxiv, doi:10.1101/2020.05.11.088674 (2020).
[1014] 17. Chen, X. et al. Human monoclonal antibodies block the binding of SARS-CoV-2 spike protein to angiotensin converting enzyme 2 receptor. Cell Mol Immunol 17, 647-649, doi:10.1038/s41423-020-0426-7 (2020).
[1015] 18. Zeng, X. et al. Isolation of a human monoclonal antibody specific for the receptor binding domain of SARS-CoV-2 using a competitive phage biopanning strategy. Antibody Therapeutics 3, 95-100, doi:10.1093/abt/tbaa008 (2020).
[1016] 19. Liu, X. et al. Neutralizing Antibodies Isolated by a site-directed Screening have Potent Protection on SARS-CoV-2 Infection. bioRxiv, 2020.2005.2003.074914, doi:10.1101/2020.05.03.074914 (2020).
[1017] 20. Zost, S. J. et al. Rapid isolation and profiling of a diverse panel of human monoclonal antibodies targeting the SARS-CoV-2 spike protein. bioRxiv, doi:10.1101/2020.05.12.091462 (2020).
[1018] 21. Robbiani, D. F. et al. Convergent Antibody Responses to SARS-CoV-2 Infection in Convalescent Individuals. bioRxiv, doi:10.1101/2020.05.13.092619 (2020).
[1019] 22. Brouwer, P. J. M. et al. Potent neutralizing antibodies from COVID-19 patients define multiple targets of vulnerability. bioRxiv, 2020.2005.2012.088716, doi:10.1101/2020.05.12.088716 (2020).
[1020] 23. Chi, X. et al. A potent neutralizing human antibody reveals the N-terminal domain of the Spike protein of SARS-CoV-2 as a site of vulnerability. bioRxiv, 2020.2005.2008.083964 doi:10.1101/2020.05.08.083964 (2020).
[1021] 24. Wang, C. et al. A human monoclonal antibody blocking SARS-CoV-2 infection. Nat Commun 11, 2251, doi:10.1038/s41467-020-16256-y (2020).
[1022] 25. Wang, P. et al. SARS-CoV-2 Neutralizing Antibody Responses Are More Robust in Patients with Severe Disease. bioRxiv, 2020.2006.2013.150250, doi:10.1101/2020.06.13.150250 (2020).
[1023] 26. Schramm, C. A. et al. SONAR: A High-Throughput Pipeline for Inferring Antibody Ontogenies from Longitudinal Sequencing of B Cell Transcripts. Frontiers in immunology 7, 372, doi:10.3389/fimmu.2016.00372 (2016).
[1024] 27. Altschul, S. F. et al. Gapped BLAST and PSI-BLAST: a new generation of protein database search programs. Nucleic Acids Res 25, 3389-3402 (1997).
[1025] 28. Lefranc, M. P. et al. IMGT, the international ImMunoGeneTics information system. Nucleic Acids Res 37, D1006-1012, doi:10.1093/nar/gkn838 (2009).
[1026] 29. Sievers, F. & Higgins, D. G. Clustal Omega, Accurate Alignment of Very Large Numbers of Sequences. Multiple Sequence Alignment Methods 1079, 105-116, doi:10.1007/978-1-62703-646-7_6 (2014).
[1027] 30. Edgar, R. C. Search and clustering orders of magnitude faster than BLAST. Bioinformatics 26, 2460-2461, doi:10.1093/bioinformatics/btq461 (2010).
[1028] 31. Sheng, Z. et al. Gene-Specific Substitution Profiles Describe the Types and Frequencies of Amino Acid Changes during Antibody Somatic Hypermutation. Frontiers in immunology 8, 537 (2017).
[1029] 32. Nie, J. et al. Establishment and validation of a pseudovirus neutralization assay for SARS-CoV-2. Emerg Microbes Infect 9, 680-686, doi:10.1080/22221751.2020.1743767 (2020).
[1030] 33. Whitt, M. A. Generation of VSV pseudotypes using recombinant DeltaG-VSV for studies on virus entry, identification of entry inhibitors, and immune responses to vaccines. J Virol Methods 169, 365-374, doi:10.1016/j.jviromet.2010.08.006 (2010).
[1031] 34. Subway, C. et al. Automated molecular microscopy: the new Leginon system. J Struct Bio1151, 41-60, doi:10.1016/j.jsb.2005.03.010 (2005).
[1032] 35. Punjani, A., Rubinstein, J. L., Fleet, D. J. & Brubaker, M. A. cryoSPARC: algorithms for rapid unsupervised cryo-EM structure determination. Nat Methods 14, 290-296, doi:10.1038/nmeth.4169 (2017).
[1033] 36. Bepler, T. et al. Positive-unlabeled convolutional neural networks for particle picking in cryo-electron micrographs. Nature Methods 16, 1153-1160, doi:10.1038/s41592-019-0575-8 (2019).
[1034] 37. Pettersen, E. F. et al. UCSF Chimera—a visualization system for exploratory research and analysis. J Comput Chem 25, 1605-1612, doi:10.1002/jcc.20084 (2004).
[1035] 38. Tan, Y. Z. et al. Addressing preferred specimen orientation in single-particle cryo-EM through tilting. Nat Methods 14, 793-796, doi:10.1038/nmeth.4347 (2017).
[1036] 39. Zheng, S. Q. et al. MotionCor2: anisotropic correction of beam-induced motion for improved cryo-electron microscopy. Nat Methods 14, 331-332, doi:10.1038/nmeth.4193 (2017).
[1037] 40. Zhu, K. et al. Antibody structure determination using a combination of homology modeling, energy-based refinement, and loop prediction. Proteins 82, 1646-1655, doi:10.1002/prot.24551 (2014).
[1038] 41. Croll, T. I. ISOLDE: a physically realistic environment for model building into low-resolution 653 electron-density maps. Acta Crystallogr D Struct Biol 74, 519-530, 654 doi: 10.1107/S2059798318002425 (2018).
[1039] 42. Emsley, P. & Cowtan, K. Coot: model-building tools for molecular graphics. ActaCrystallogr D Biol Crystallogr 60, 2126-2132, doi:10.1107/S0907444904019158 (2004)
[1040] 43. Adams, P. D. et al. Recent developments in the PHENIX software for automated 658 crystallographic structure determination. J Synchrotron Radiat 11, 53-55, doi:10.1107/s0909049503024130 (2004).
[1041] 44. Davis, I. W., Murray, L. W., Richardson, J. S. & Richardson, D. C. MOLPROBITY: structure validation and all-atom contact analysis for nucleic acids and their complexes. Nucleic Acids Res 32, W615-619, doi:10.1093/nar/gkh398 (2004).
[1042] 45. Barad, B. A. et al. EMRinger: side chain-directed model and map validation for 3D cryo-electron microscopy. Nat Methods 12, 943-946, doi:10.1038/nmeth.3541 (2015).
[1043] 46. Goddard, T. D. et al. UCSF ChimeraX: Meeting modern challenges in visualization and analysis. Protein Sci 27, 14-25, doi:10.1002/pro.3235 (2018).

### Example 11—Potent Neutralizing Monoclonal Antibodies

[1044] FIGS. 32A-B show monoclonal antibody 2-15 mut. FIG. 32A shows virus neutralization with the 2-15 mut antibody. FIG. 32B shows potency of the 2-15 mut antibody. The 2-15 mut antibody displays an IC₅₀ concentration of less than 0.00064 μg/ml and an IC₉₀ concertation of 0.011 μg/ml.

[1045] FIGS. 33A-B show select mutants of the 4-8 monoclonal antibody. FIG. 33A shows neutralization with antibodies 4-8 (39/51) and 4-8(39/51/57). FIG. 33B shows potency of antibodies 4-8 (39/51) and 4-8(39/51/57). The 4-8(39/51) antibody displays an IC₅₀ concentration of 0.002 μg/ml and an IC₉₀ concertation of 0.108 μg/ml. The 4-8(39/51/57) antibody displays an IC₅₀ concentration of 0.003 μg/ml and an IC₉₀ concertation of 0.014 μg/ml.

[1046] FIG. 34 shows a summary of IC₅₀ and IC₉₀ values of selected monoclonal antibody mutants.

### Example 12—Identification and Characterization of a Cross-Neutralizing Monoclonal Antibody 2-36

[1047] SARS-CoV-2 is phylogenetically closely related to SARS-CoV, which caused the 2002-2003 human epidemic. SARS-CoV and SARS-CoV-2 share 76% amino acid identity in their Spike proteins, raising the possibility of conserved immunogenic surfaces on these antigens. Many human monoclonal antibodies have now been shown to target the SARS-CoV-2 Spike protein, but cross-neutralizing antibodies are relatively uncommon in individuals with COVID-19. There are also SARS-like viruses including some zoonotic sarbecoviruses in bats or pangolins which could infect human cells, and therefore, have the potential to cause next pandemics.

[1048] Our invention claims to isolate and characterize a monoclonal antibody that could not only neutralize SARS-CoV-2 and SARS-CoV but also neutralize sarbecoviruses in bats and pangolins. Such cross-neutralizing antibodies are extremely valuable to understand how to confer broader protection against human SARS-like viruses that include the extensive reservoir of zoonotic sarbecoviruses in bats, pangolins, etc.

[1049] In order to find antibodies that have cross-neutralizing activities, we screened anti-SARS-CoV antibodies from COVID-19 convalescent patients. SARS-CoV-2 spike specific antibodies were isolated by single-B cell sorting and 10X genomics sequencing, and then the antibodies were synthesized and the transfection supernatants were used to screen anti-SARS-CoV antibodies using SARS-CoV pseudovirus. While most of the antibodies showed no or very weak neutralizing activity, antibody 2-36 was found to be a potent neutralizer against SARS-CoV (FIG. 35).

[1050] We next characterized this antibody by first testing its binding to SARS-CoV-2 and SARS-CoV spikes by ELISA with CR3022, an antibody previously reported to have cross-activity, as a control. We confirmed that antibody 2-36 can bind to both SARS-CoV-2 and SARS-CoV spikes (FIGS. 36A-B). We then measured the binding affinity of antibody 2-36 to those spikes by SPR and we further confirmed that antibody 2-36 can bind to both SARS-CoV-2 (FIG. 37A) and SARS-CoV (FIG. 37B) spikes but with a higher affinity to SARS-CoV-2 spike. As a control, the SARS-CoV-2 specific antibody 2-4 only binds only to SARS-CoV-2 spike but not to SARS-CoV spike (FIGS. 37C-D).

[1051] We then tested the neutralization activity of antibody 2-36 against SARS-CoV-2 and SARS-CoV, and showed that antibody 2-36 can potently neutralize SARS-CoV-2 with IC₅₀ 0.004 μg/ml (FIG. 38A). Antibody 2-36 also neutralized SARS-CoV, but with a lower potency, IC₅₀ 0.386 μg/ml (FIG. 38B). The control antibody CR3022 neutralizes SARS-CoV but very weakly on SARS-CoV-2; and antibody 2-4 only neutralizes SARS-CoV-2 (FIGS. 38A-B).

[1052] We also tested antibody 2-36 against a panel of other coronaviruses including, MERS-CoV, human common cold coronavirus 229E and some bat and pangolin coronaviruses (FIG. 39A) including 6 among the SARS-CoV-related lineage (e.g., WIV1, SHC014, LYRal 1, Rs7327, Rs4231, Rs4084) and 3 in the SARS-CoV-2-related lineage (e.g., RaTG13, GDPangolin, GXPangolin). Pseudoviruses with the spikes of these coronaviruses were made and tested. As shown in FIG. 39B, antibody 2-36 neutralized SARS-CoV and SARS-CoV-2 and their related lineage viruses, but did not neutralize MERS-CoV and 229E, indicating its breadth.

[1053] We also solved the Cryo-EM structure of antibody 2-36 in complex with SARS-CoV-2 Spike trimer (FIG. 40A), which showed in detail how the antibody interact with spike (FIG. 40B). 2-36 binds to the side of the RBD and can compete with ACE2 for RBD binding, although its epitope does not overlap the ACE2-binding site (FIG. 40C). The 2-36 epitope on the spike is highly conserved among SARS-CoV-2, SARS-CoV, and other SARS-related coronaviruses (FIG. 40D), which could explain why 2-36 showed such broad neutralizing properties.

[1054] As such, antibody 2-36 can serve as the starting point for engineering a more potent antibody against diverse bat coronaviruses with human pandemic potential. Such an antibody could be further developed and placed in the national stockpile for pandemic preparedness. Furthermore, we have a defined a conserved site in the spike that could be targeted for development of a broadly protective vaccine against bat coronaviruses with pandemic potential.

### Example 13 Monoclonal Antibody Number 2-36

[1055] Antibody 2-36 is a monoclonal antibody that neutralizes SARS-CoV-2 variants, SARS-CoV, and other beta-coronaviruses. To screen monoclonal antibodies with cross-neutralizing activity against other beta-coronaviruses, more than 200 mAbs isolated from COVID-19 convalescent patients (Liu et al. Nature 2020) were tested on SARS-CoV pseudovirus. Monoclonal antibody 2-36 not only neutralizes SARS-CoV-2 pseudovirus at IC₅₀ ˜0.04 μg/ml and authentic virus at IC50 ˜0.1 μg/mL, but also shows neutralizing activity against SARS-CoV, although with lower potency (IC50 ˜0.2 μg/mL on pseudovirus and IC50 ˜7.5 μg/mL on authentic virus). Monoclonal antibody 2-36 can block SARS-CoV-2 spike trimer binding to ACE2. Conservation analysis on the receptor-binding domain (RBD) among SARS-CoV-2, SARS-CoV, and some bat and pangolin coronavirus strains show that the 2-36 binding site is highly conserved. Antibody 2-36 was tested on different SARS-CoV-2 variants of concern/interest (including B.1.1.7, B.1.351, P.1, B.1.526, R.1, B.1.429) and many single mutations with high circulating frequency. The results show that antibody 2-36 can neutralize all these variants/mutations without any significant loss of activities. Moreover, besides SARS-CoV-2 and SARS-CoV, antibody 2-36 also neutralizes some bat and pangolin coronaviruses which can use human ACE2 as a receptor to enter host cells. These coronaviruses include but are not limited to RaTG13, WIV1, SHC014, GDPangolin, and GXPangolin viruses. Antibody 2-36 escape mutations were selected by in vitro passage of SARS-CoV-2 in Vero E6 cells in presence of 2-36 and confirmed that K378T in spike RBD, with very low frequency in nature, led to viral resistance. Taken these results together, 2-36 represents a promising strategic reserve drug candidate for the prevention and treatment of possible diseases caused by pre-emergent SARS-related CoVs.

[1056] FIGS. 90A-D show virus neutralization with monoclonal antibody 2-36. FIG. 90A shows screening of transfection supernatant for neutralization activity against SARS-CoV-2 pseudovirus. FIG. 90B shows screening of transfection supernatant for neutralization activity against SARS-CoV pseudovirus. FIG. 90C shows 2-36 neutralization IC50 (μg/mL) against SARS-CoV-2 pseudovirus (PV) and live virus (LV). FIG. 90D shows 2-36 neutralization IC50 (μg/mL) against SARS-CoV pseudovirus (PV) and live virus (LV).

[1057] FIGS. 91A-B show binding of monoclonal antibody 2-36 to SARS-CoV-2 (FIG. 91A) and SARS-CoV (FIG. 91B) spike as determined by ELISA.

[1058] FIGS. 92A-H show binding affinity for monoclonal antibodies 2-36 and 2-4 to SARS-CoV-2 and SARS-CoV viruses as measured by SPR. FIG. 92A shows 2-36 binding affinity to SARS-CoV-2 spike protein. FIG. 92B shows 2-4 binding affinity to SARS-CoV-2 spike protein. FIG. 92C shows 2-36 binding affinity to SARS-CoV spike protein. FIG. 92D shows 2-4 binding affinity to SARS-CoV spike protein. FIG. 92E shows 2-36 binding affinity to SARS-CoV-2 receptor binding domain (RBD). FIG. 92F shows 2-4 binding affinity to SARS-CoV-2 RBD. FIG. 92G shows 2-36 binding affinity to SARS-CoV RBD. FIG. 9211 shows 2-4 binding affinity to SARS-CoV RBD.

[1059] FIGS. 93A-B show binding to SARS-CoV-2 spike protein. FIG. 93A shows that binding of monoclonal antibody 2-36 to SARS-CoV-2 spike is inhibited by CR3022. FIG. 93B shows that monoclonal antibody 2-36 inhibits hACE2 binding to SARS-CoV-2 spike protein.

[1060] FIG. 94 shows conservation analysis on the RBD among SARS CoV-2, SARS CoV-1, Bat CoVs, and Human CoVs virus strains. The analysis shows that the 2-36 binding site is highly conserved; with regions of high conservation in grey and low conservation in red. The 2-36 binding site is outlined in blue.

[1061] FIGS. 95A-D show that monoclonal antibody 2-36 neutralizes SARS-CoV-2 variants and SARS-like coronaviruses using hACE2. FIG. 95A shows neutralization against live variants. FIG. 95B shows neutralization against pseudovariants. FIG. 95C shows evolution tree of viruses. FIG. 95D shows antibody potency against viruses.

[1062] FIGS. 96A-D shows that monoclonal antibody 2-36 neutralizes SARS-like coronaviruses using hACE2. FIG. 96A shows virus neutralization with 2-36 antibody. FIG. 96B shows virus neutralization with S309 antibody. FIG. 96C shows virus neutralization with COVA1-16 antibody. FIG. 96D shows virus neutralization with CR3022 antibody.

[1063] FIGS. 97A-D show in vitro selection of 2-36 antibody escape mutations. FIG. 97A shows evolution of escape mutations during in vitro passage of SARS-CoV-2 USA/WA1 in Vero E6 cells in the presence of 2-36. FIG. 97B shows 2-36 neutralization activity tested against virus passages. FIG. 97C shows spike protein with selected mutation localized. FIG. 97D shows that the selected escape mutations were introduced into pseudoviruses and then 2-36 neutralization activity was tested against these viruses.

### Examples for Bispecific Antibodies

[1064] As described herein, bispecific antibodies bearing either the 1400 arm or the A32 arm indicate that those arms of the bispecific antibody are not specific to and do not bind the spike protein of the SARS-CoV-2 virus. These antibodies provide an “irrelevant” control to demonstrate the need for avidity by “both” arms of bispecific antibodies being controlled for. Constructs bearing these irrelevant controls are referred to as single arm IgG controls. 1400 (PGDM1400) is a neutralizing monoclonal antibody against the human immunodeficiency virus (HIV). A32 is a non-neutralizing monoclonal antibody against HIV. The same control antibodies were used throughout the study. AbX and AbY are controls, X=PGDM1400 (HIV neutralization antibody). Y=A32 (HIV neutralization antibody). Because they do not neutralize SARS-CoV-2 or any variant strains, they are utilized herein to construct bispecific antibodies with one arm against SARS-CoV-2 and the other arm without any activity against SARS-CoV-2. These control antibodies, therefore, allow one to accurately attribute the contribution of each arm to the activity of the bispecific antibodies.

### Example 14

[1065] FIG. 42 shows that the 2-17/1-57 bispecific antibody against SARS-CoV-2 does not enhance potency compared to respective single arm counterpart. Ab X and Ab Y are single arm irrelevant controls. X=PGDM1400 (HIV neutralization Ab). Y=A32 (HIV neutralization Ab). The IC₅₀ of the 2-17/1-57 bispecific antibody is 0.023 μg/mL. The IC₉₀ of the 2-17/1-57 bispecific antibody is 0.167 μg/mL. The IC₅₀ of the Ab X/1-57 control is 0.014 μg/mL. The IC₉₀ of the Ab X/1-57 control is 0.424 μg/mL. The IC₅₀ of the 2-17/Ab Y control is 1.451 μg/mL. The IC₉₀ of the 2-17/Ab Y control is 3.572 μg/mL.

[1066] FIG. 43 shows potent neutralization of bispecific antibody 2-17/2-7 against SARS-CoV-2 compared to respective single arm counterpart. Ab X and Ab Y are single arm irrelevant controls. X=PGDM1400 (HIV neutralization Ab). Y=A32 (HIV neutralization Ab). The IC₅₀ of the 2-17/2-7 bispecific antibody is 0.008 μg/mL. The IC₉₀ of the 2-17/2-7 bispecific antibody is 0.025 μg/mL. The IC₅₀ of the Ab X/2-7 control is 0.028 μg/mL. The IC₉₀ of the Ab X/2-7 control is 0.162 μg/mL. The IC₅₀ of the 2-17/Ab Y control is 1.451 μg/mL. The IC₉₀ of the 2-17/Ab Y bispecific antibody is 3.572 μg/mL.

[1067] FIG. 44 shows potent neutralization of bispecific antibody 2-17/2-15 against SARS-CoV-2 compared to respective single arm counterpart. Ab X and Ab Y are single arm irrelevant controls. X=PGDM1400 (HIV neutralization Ab). Y=A32 (HIV neutralization Ab). The IC₅₀ of the 2-17/2-15 bispecific antibody is 0.006 μg/mL. The IC₉₀ of the 2-17/2-15 bispecific antibody is 0.085 μg/mL. The IC₅₀ of the Ab X/2-15 control is 0.043 μg/mL. The IC₉₀ of the Ab X/2-15 bispecific antibody is 0.232 μg/mL. The IC₅₀ of the 2-17/Ab Y control is 1.451 μg/mL. The IC₉₀ of the 2-17/Ab Y control is 3.572 μg/mL.

[1068] FIG. 45 shows potent neutralization of bispecific antibody 2-17/2-30 against SARS-CoV-2 compared to respective single arm counterpart. Ab X and Ab Y are single arm irrelevant controls. X=PGDM1400 (HIV neutralization Ab). Y=A32 (HIV neutralization Ab). The IC₅₀ of the 2-17/2-30 bispecific antibody is 0.065 μg/mL. The IC₉₀ of the 2-17/2-30 bispecific antibody is 0.598 μg/mL. The IC₅₀ of the Ab X/2-30 control is 0.349 μg/mL. The IC₉₀ of the Ab X/2-30 control is 4.939 μg/mL. The IC₅₀ of the 2-17/Ab Y control is 1.451 μg/mL. The IC₉₀ of the 2-17/Ab Y control is 3.572 μg/mL.

[1069] FIG. 46 shows potent neutralization of bispecific antibody 2-17/4-20 against SARS-CoV-2 compared to respective single arm counterpart. Ab X and Ab Y are single arm irrelevant controls. X=PGDM1400 (HIV neutralization Ab). Y=A32 (HIV neutralization Ab). The IC₅₀ of the 2-17/4-20 bispecific antibody is 0.030 μg/mL. The IC₉₀ of the 2-17/4-20 bispecific antibody is 0.164 μg/mL. The IC₅₀ of the Ab X/4-20 control is 0.084 μg/mL. The IC₉₀ of the Ab X/4-20 control is 3.066 μg/mL. The IC₅₀ of the 2-17/Ab Y control is 1.451 μg/mL. The IC₉₀ of the 2-17/Ab Y control is 3.572 μg/mL.

[1070] FIG. 47 shows potent neutralization of bispecific antibody 5-24/1-57 against SARS-CoV-2 compared to respective single arm counterpart. Ab X and Ab Y are single arm irrelevant controls. X=PGDM1400 (HIV neutralization Ab). Y=A32 (HIV neutralization Ab). The IC₅₀ of the 5-24/1-57 bispecific antibody is 0.004 μg/mL. The IC₉₀ of the 5-24/1-57 bispecific antibody is 0.046 μg/mL. The IC₅₀ of the Ab X/1-57 control is 0.014 μg/mL. The IC₉₀ of the Ab X/1-57 control is 0.424 μg/mL. The IC₅₀ of the 5-24/Ab Y control is 0.137 μg/mL. The IC₉₀ of the 5-24/Ab Y control is 2.320 μg/mL.

[1071] FIG. 48 shows potent neutralization of bispecific antibody 5-24/2-15 against SARS-CoV-2 compared to respective single arm counterpart. Ab X and Ab Y are single arm irrelevant controls. X=PGDM1400 (HIV neutralization Ab). Y=A32 (HIV neutralization Ab). The IC₅₀ of the 5-24/2-15 bispecific antibody is 0.004 μg/mL. The IC₉₀ of the 5-24/2-15 bispecific antibody is 0.033 μg/mL. The IC₅₀ of the Ab X/2-15 control is 0.043 μg/mL. The IC₉₀ of the ab X/2-15 control is 0.232 μg/mL. The IC₅₀ of the 5-24/Ab Y control is 0.137 μg/mL. The IC₉₀ of the 5-24/Ab Y control is 2.320 μg/mL.

[1072] FIG. 49 shows bispecific antibody 5-24/4-20 against SARS-CoV-2 does not enhance potency (IC₅₀) compared to respective single arm counterpart. Ab X and Ab Y are single arm irrelevant controls. X=PGDM1400 (HIV neutralization Ab). Y=A32 (HIV neutralization Ab). The IC₅₀ of the 5-24/4-20 bispecific antibody is 0.063 μg/mL. The IC₉₀ of the 5-24/4-20 bispecific antibody is 0.222 μg/mL. The IC₅₀ of the Ab X/4-20 control is 0.084 μg/mL. The IC₉₀ of the Ab X/4-20 control is 3.066 μg/mL. The IC₅₀ of the 5-24/Ab Y control is 0.137 μg/mL. The IC₉₀ of the 5-24/Ab Y control is 2.320 μg/mL.

[1073] FIG. 50 shows potent neutralization of bispecific antibody 1-20/1-68 against SARS-CoV-2 compared to respective single arm counterpart. Ab X and Ab Y are single arm irrelevant controls. X=PGDM1400 (HIV neutralization Ab). Y=A32 (HIV neutralization Ab). The IC₅₀ of the 1-20/1-68 bispecific antibody is 0.010 μg/mL. The IC₉₀ of the 1-20/1-68 bispecific antibody is 0.157 μg/mL. The IC₅₀ of the 1-20/Ab Y control is 0.078 μg/mL. The IC₉₀ of the 1-20/Ab Y control is 1.241 μg/mL. The IC₅₀ of the Ab X/1-68 control is 0.035 μg/mL. The IC₉₀ of the Ab X/1-68 control is 0.332 μg/mL.

[1074] FIG. 51 shows potent neutralization of bispecific antibody 1-20/2-17 against SARS-CoV-2 compared to respective single arm counterpart. Ab X and Ab Y are single arm irrelevant controls. X=PGDM1400 (HIV neutralization Ab). Y=A32 (HIV neutralization Ab). The IC₅₀ of the 1-20/2-17 bispecific antibody is 0.025 μg/mL. The IC₉₀ of the 1-20/2-17 bispecific antibody is 0.213 μg/mL. The IC₅₀ of the 1-20/Ab Y control is 0.078 μg/mL. The IC₉₀ of the 1-20/Ab Y control is 1.241 μg/mL. The IC₅₀ of the Ab X/2-17 control is 0.380 μg/mL. The IC₉₀ of the Ab X/2-17 control is 3.912 μg/mL.

[1075] FIG. 52 shows potent neutralization of bispecific antibody 1-20/4-18 against SARS-CoV-2 compared to respective single arm counterpart. Ab X and Ab Y are single arm irrelevant controls. X=PGDM1400 (HIV neutralization Ab). Y=A32 (HIV neutralization Ab). The IC₅₀ of the 1-20/4-18 bispecific antibody is 0.009 μg/mL. The IC₉₀ of the 1-20/4-18 bispecific antibody is 0.043 μg/mL. The IC₅₀ of the 1-20/Ab Y control is 0.078 μg/mL. The IC₉₀ of the 1-20/Ab Y control is 1.241 μg/mL. The IC₅₀ of the Ab X/4-18 control is 0.049 μg/mL. The IC₉₀ of the Ab X/4-18 control is 3.463 μg/mL.

[1076] FIG. 53 shows potent neutralization of bispecific antibody 1-20/5-24 against SARS-CoV-2 compared to respective single arm counterpart. Ab X and Ab Y are single arm irrelevant controls. X=PGDM1400 (HIV neutralization Ab). Y=A32 (HIV neutralization Ab). The IC₅₀ of the 1-20/5-24 bispecific antibody is 0.009 μg/mL. The IC₉₀ of the 1-20/5-24 bispecific antibody is 0.035 μg/mL. The IC₅₀ of the 1-20/Ab Y control is 0.078 μg/mL. The IC₉₀ of the 1-20/Ab Y control is 1.241 μg/mL. The IC₅₀ of the Ab X/5-24 control is 0.500 μg/mL. The IC₉₀ of the Ab X/5-24 control is 4.120 μg/mL.

[1077] Constructed bispecific antibodies show potent neutralization against SARS-CoV-2 at a level similar or better than the parental antibodies. Both arms of the bispecific antibodies contribute to the neutralization activity of the bispecific molecule. A bispecific antibody is a single molecule with high barrier for viral escape and/or synergetic potency for COVID-19 treatment and prevention. Activity enhancement observed can be extended to any engineered bispecific antibody format.

[1078] FIG. 54 shows potent neutralization against SARS-CoV-2. Bispecific antibodies with 2-17 as a component are more potent than the single arm control (2-17/A32, A32 is a control antibody show no activity against SARS-CoV-2), indicating that the other arm targeting the different viral epitope together with the 2-17 arm are contributing to the overall neutralization activity of the bispecific molecule. FIG. 54 shows IC₅₀ and IC₉₀ values for 2-17-containing bispecific antibodies.

[1079] FIG. 55 shows potent neutralization against SARS-CoV-2 with bispecific antibodies containing 5-24 as a component. FIG. 55 shows IC₅₀ and IC₉₀ values for 5-24-containing bispecific antibodies.

[1080] FIG. 56 shows potent neutralization against SARS-CoV-2 with bispecific antibodies containing 1-20 as a component. FIG. 56 shows IC₅₀ and IC₉₀ values for 1-20-containing bispecific antibodies.

### Example 15

[1081] FIGS. 57A-E show bispecific antibodies with 1-20 (RBD) as a parental antibody. FIG. 57A shows virus neutralization with bispecific antibodies 1-20/5-24, 1-20/4-18, 1-20/2-17, and 1-20/1-68. FIG. 57B shows virus neutralization with the bispecific antibody 1-20/5-24 compared to control antibodies. FIG. 57C shows virus neutralization with the bispecific antibody 1-20/4-18 compared to control antibodies. FIG. 57D shows virus neutralization with the bispecific antibody 1-20/2-17 compared to control antibodies. FIG. 57E shows virus neutralization with the bispecific antibody 1-20/1-68 compared to control antibodies. Control antibodies were generated using irrelevant antibody such as PGDM1400 (Ab X) or A32 (Ab Y) replacing one arm of the bispecific antibody.

[1082] FIG. 58 shows potencies of bispecific antibodies with 1-20 (RBD) as a parental antibody. The IC₅₀ of bispecific antibody 1-20/5-24 is 0.009 μg/ml. The IC₉₀ of bispecific antibody 1-20/5-24 is 0.035 μg/ml. The IC₅₀ of bispecific antibody 1-20/4-18 is 0.009 μg/ml. The IC₉₀ of bispecific antibody 1-20/4-18 is 0.043 μg/ml. The IC₅₀ of bispecific antibody 1-20/2-17 is 0.025 μg/ml. The IC₉₀ of bispecific antibody 1-20/2-17 is 0.212 μg/ml. The IC₅₀ of bispecific antibody 1-20/1-68 is 0.009 μg/ml. The IC₉₀ of bispecific antibody 1-20/1-68 is 0.028 μg/ml.

[1083] FIGS. 59A-G show bispecific antibodies with 2-17 (NTD) as a parental antibody. FIG. 59A shows virus neutralization with bispecific antibodies 2-17/2-7, 2-17/1-57, 2-36/2-17, 2-17/4-20, 2-17/2-30, and 2-17/2-15. FIG. 59B shows virus neutralization with the bispecific antibody 2-17/2-7 compared to control antibodies. FIG. 59C shows virus neutralization with the bispecific antibody 2-17/1-57 compared to control antibodies. FIG. 59D shows virus neutralization with the bispecific antibody 2-17/2-15 compared to control antibodies. FIG. 59E shows virus neutralization with the bispecific antibody 2-17/4-20 compared to control antibodies. FIG. 59F shows virus neutralization with the bispecific antibody 2-17/2-30 compared to control antibodies. FIG. 59G shows virus neutralization with the bispecific antibody 2-36/2-17 compared to control antibodies.

[1084] FIG. 60 shows potencies of bispecific antibodies with 2-17 (NTD) as a parental antibody. The IC₅₀ of bispecific antibody 2-17/1-57 is 0.075 μg/ml. The IC₉₀ of bispecific antibody 2-17/1-57 is 0.144 μg/ml. The IC₅₀ of bispecific antibody 2-17/2-7 is 0.009 μg/ml. The IC₉₀ of bispecific antibody 2-17/2-7 is 0.027 μg/ml. The IC₅₀ of bispecific antibody 2-17/2-15 is 0.005 μg/ml. The IC₉₀ of bispecific antibody 2-17/2-15 is 0.087 μg/ml. The IC₅₀ of bispecific antibody 2-17/2-30 is 0.065 μg/ml. The IC₉₀ of bispecific antibody 2-17/2-30 is 0.598 μg/ml. The IC₅₀ of bispecific antibody 2-17/4-20 is 0.029 μg/ml. The IC₉₀ of bispecific antibody 2-17/4-20 is 0.164 μg/ml. The IC₅₀ of bispecific antibody 2-36/2-17 is 0.063 μg/ml. The IC₉₀ of bispecific antibody 2-36/2-17 is 4.55 μg/ml.

[1085] FIGS. 61A-D show bispecific antibodies with 5-24 (NTD) as a parental antibody. FIG. 61A shows virus neutralization with bispecific antibodies 5-24/4-20, 5-24/1-57, 5-24/2-15, and 1-20/5-24. FIG. 61B shows virus neutralization with the bispecific antibody 5-24/2-15 compared to control antibodies. FIG. 61C shows virus neutralization with the bispecific antibody 5-24/1-57 compared to control antibodies. FIG. 61D shows virus neutralization with the bispecific antibody 5-24/4-20 compared to control antibodies.

[1086] FIG. 62 shows potencies of bispecific antibodies with 5-24 (NTD) as a parental antibody. The IC₅₀ of bispecific antibody 1-20/5-24 is 0.009 μg/ml. The IC₉₀ of bispecific antibody 1-20/5-24 is 0.035 μg/ml. The IC₅₀ of bispecific antibody 5-24/2-15 is 0.003 μg/ml. The IC₉₀ of bispecific antibody 5-24/2-15 is 0.033 μg/ml. The IC₅₀ of bispecific antibody 5-24/1-57 is 0.004 μg/ml. The IC₉₀ of bispecific antibody 5-24/1-57 is 0.045 μg/ml. The IC₅₀ of bispecific antibody 5-24/4-20 is 0.062 μg/ml. The IC₉₀ of bispecific antibody 5-24/4-20 is 0.222 μg/ml.

[1087] FIGS. 63A-D show bispecific antibodies with 2-36 (RBD) as a parental antibody. FIG. 63A shows virus neutralization with bispecific antibodies 2-36/1-68, 2-36/4-18, and 2-36/2-17. FIG. 63B shows virus neutralization with the bispecific antibody 2-36/2-17 compared to control antibodies. FIG. 63C shows virus neutralization with the bispecific antibody 2-36/1-68 compared to control antibodies. FIG. 63D shows virus neutralization with the bispecific antibody 2-36/4-18 compared to control antibodies.

[1088] FIG. 64 shows potencies of bispecific antibodies with 2-36 (RBD) as a parental antibody. The IC₅₀ of bispecific antibody 2-36/1-69 is 0.096 μg/ml. The IC₉₀ of bispecific antibody 2-36/1-68 is 9.948 μg/ml. The IC₅₀ of bispecific antibody 2-36/4-18 is 0.03 μg/ml. The IC₉₀ of bispecific antibody 2-36/4-18 is 0.982 μg/ml. The IC₅₀ of bispecific antibody 2-36/2-17 is 0.063 μg/ml. The IC₉₀ of bispecific antibody 2-36/2-17 is 4.55 μg/ml.

[1089] FIGS. 65A-C show bispecific antibodies with 2-30 (RBD) as a parental antibody. FIG. 65A shows virus neutralization with bispecific antibodies 2-30/4-18 and 2-30/1-68. FIG. 65B shows virus neutralization with the bispecific antibody 2-30/1-68 compared to control antibodies. FIG. 65C shows virus neutralization with the bispecific antibody 2-30/4-18 compared to control antibodies.

[1090] FIG. 66 shows potencies of bispecific antibodies with 2-30 (RBD) as a parental antibody. The IC₅₀ of bispecific antibody 2-30/4-18 is 0.026 μg/ml. The IC₉₀ of bispecific antibody 2-30/4-18 is 0.096 μg/ml. The IC₅₀ of bispecific antibody 2-30/1-68 is 0.008 μg/ml. The IC₉₀ of bispecific antibody 2-30/1-68 is 0.036 μg/ml.

[1091] FIGS. 67A-D show comparative evaluations of bispecific antibody 2-17/2-7. FIG. 67A shows the potency of the 2-17/2-7 bispecific antibody compared to an antibody where one arm resembles the individual parental component of the bispecific antibody while the other arm is an irrelevant control. It also compares the potency of the bispecific antibody to the combination of the two single arm IgG controls. FIG. 67B shows virus neutralization with a combination of the parental antibodies and each of the parental antibodies. FIG. 67C shows virus neutralization with the bispecific antibody 2-17/2-7 compared to a combination of the parental antibodies. FIG. 67D shows potency of combination parental monoclonal antibodies tested each at half of the amount of the corresponding bispecific antibody. The IC₅₀ of bispecific antibody 2-17/2-7 is 0.005 μg/ml. The IC₉₀ of bispecific antibody 2-17/2-7 is 0.02 μg/ml. The IC₅₀ of the combination of parental antibodies is 0.014 μg/ml. The IC₉₀ of the combination of parental antibodies is 0.07 μg/ml.

[1092] FIGS. 68A-D show comparative evaluations of bispecific antibody 1-20/4-18. FIG. 68A shows the potency of the 1-20/4-18 bispecific antibody compared to an antibody where one arm resembles the individual parental component of the bispecific antibody while the other arm is an irrelevant control. It also compares the potency of the bispecific antibody to the combination of the two single arm IgG controls. FIG. 68B shows virus neutralization with a combination of the parental antibodies and each of the parental antibodies. FIG. 68C shows virus neutralization with the bispecific antibody 1-20/4-18 compared to a combination of the parental antibodies. FIG. 68D shows potency of combination parental monoclonal antibodies tested each at half of the amount of the corresponding bispecific antibody. The IC₅₀ of bispecific antibody 1-20/4-18 is 0.016 μg/ml. The IC₉₀ of bispecific antibody 1-20/4-18 is 0.076 μg/ml. The IC₅₀ of the combination of parental antibodies is 0.014 μg/ml. The IC₉₀ of the combination of parental antibodies is 0.057 μg/ml.

[1093] FIGS. 69A-D show comparative evaluations of bispecific antibody 1-20/5-24. FIG. 69A shows the potency of the 1-20/5-24 bispecific antibody compared to an antibody where one arm resembles the individual parental component of the bispecific antibody while the other arm is an irrelevant control. It also compares the potency of the bispecific antibody to the combination of the two single arm IgG controls. FIG. 69B shows virus neutralization with a combination of the parental antibodies and each of the parental antibodies. FIG. 69C shows virus neutralization with the bispecific antibody 1-20/5-24 compared to a combination of the parental antibodies. FIG. 69D shows potency of combination parental monoclonal antibodies tested each at half of the amount of the corresponding bispecific antibody. The IC₅₀ of bispecific antibody 1-20/5-24 is 0.012 μg/ml. The IC₉₀ of bispecific antibody 1-20/5-24 is 0.023 μg/ml. The IC₅₀ of the combination of parental antibodies is 0.004 μg/ml. The IC₉₀ of the combination of parental antibodies is 0.016 μg/ml.

[1094] FIGS. 70A-D show comparative evaluations of bispecific antibody 2-17/4-20. FIG. 70A shows the potency of the 2-17/4-20 bispecific antibody to an antibody where one arm resembles the individual parental component of the bispecific antibody while the other arm is an irrelevant control. It also compares the potency of the bispecific antibody to the combination of the two single arm IgG controls. FIG. 70B shows virus neutralization with a combination of the parental antibodies and each of the parental antibodies. FIG. 70C shows virus neutralization with the bispecific antibody 2-17/4-20 compared to a combination of the parental antibodies. FIG. 70D shows potency of combination parental monoclonal antibodies tested each at half of the amount of the corresponding bispecific antibody. The IC₅₀ of bispecific antibody 2-17/4-20 is 0.042 μg/ml. The IC₉₀ of bispecific antibody 2-17/4-20 is 0.097 μg/ml. The IC₅₀ of the combination of parental antibodies is 0.021 μg/ml. The IC₉₀ of the combination of parental antibodies is 0.135 μg/ml.

[1095] FIGS. 71A-B show in vitro potency of bispecific antibodies against SARS-CoV-2 authentic virus, strain USA/WA1. FIG. 71A shows neutralization for ten bispecific antibodies with IC₉₀ concentrations between 0.003 μg/ml and 0.023 μg/ml. FIG. 71B shows neutralization for nine bispecific antibodies with IC₉₀ concentrations between 0.025 μg/ml and 0.046 μg/ml.

[1096] FIG. 72 shows in vitro potency of bispecific antibodies as indicated by respective IC₅₀ and IC₉₀ concentrations.

[1097] FIGS. 73A-B show in vitro potency of bispecific antibodies showing IC₉₀ and IC₅₀ concentrations. FIG. 73A shows in vitro potency of bispecific antibodies showing IC₉₀ and IC₅₀ concentrations relative to a 0.05 μg/ml threshold. FIG. 73B shows in vitro potency of bispecific antibodies showing IC₉₀ and IC₅₀ concentrations relative to a 0.01 μg/ml threshold. FIGS. 73A and 73B are two separated “SORTED” data. In A, the data is sorted by the top 20 bispecific antibody having the highest to lowest inhibition against 90% of the viruses (IC₉₀). In B, the data is sorted by the top 20 bispecific antibody having the highest to lowest inhibition against 50% of the viruses (IC₅₀).

[1098] FIGS. 74A-D show comparative evaluation of the bispecific antibody 1-57/1-68. FIG. 74A shows virus neutralization with the bispecific antibody 1-57/1-68 compared to two control bispecific antibodies, each comprising a parental antibody arm and a control antibody arm, and compared to a mix of the two control bispecific antibodies. AbX is an irrelevant control antibody arm, wherein AbX is PGDM1400. FIG. 74B shows virus neutralization with a combination of the parental antibodies and each of the parental antibodies. FIG. 74C shows virus neutralization with the bispecific antibody 1-57/1-68 compared to a combination of the parental antibodies. FIG. 74D shows potency of the bispecific antibody 1-57/1-68 and a mix of each parental monoclonal antibodies tested each at half of the amount of the corresponding bispecific antibody. The IC₅₀ of bispecific antibody 1-57/1-68 is 0.002 μg/ml. The IC₉₀ of bispecific antibody 1-57/1-68 is 0.005 μg/ml. The IC₅₀ of the combination of parental antibodies is 0.006 μg/ml. The IC₉₀ of the combination of parental antibodies is 0.02 μg/ml. The comparative data are from a single experiment, while, the data in the summary table are averaged from multiple repeats.

[1099] FIGS. 75A-D show comparative evaluation of the bispecific antibody 2-17/2-7. FIG. 75A shows virus neutralization with the bispecific antibody 2-17/2-7 compared to two control bispecific antibodies, each comprising a parental antibody arm and a control antibody arm, and compared to a mix of the two control bispecific antibodies. AbX and AbY are irrelevant control antibody arms, wherein AbX is PGDM1400 and AbY is A32. FIG. 75B shows virus neutralization with a combination of the parental antibodies and each of the parental antibodies. FIG. 75C shows virus neutralization with the bispecific antibody 2-17/2-7 compared to a combination of the parental antibodies. FIG. 75D shows potency of the bispecific antibody 2-17/2-7 and a mix of each parental monoclonal antibodies tested each at half of the amount of the corresponding bispecific antibody. The IC₅₀ of bispecific antibody 2-17/2-7 is 0.005 μg/ml. The IC₉₀ of bispecific antibody 2-17/2-7 is 0.02 μg/ml. The IC₅₀ of the combination of parental antibodies is 0.014 μg/ml. The IC₉₀ of the combination of parental antibodies is 0.07 μg/ml. The comparative data are from a single experiment, while, the data in the summary table are averaged from multiple repeats.

[1100] FIGS. 76A-D show comparative evaluation of the bispecific antibody 1-20/4-18. FIG. 76A shows virus neutralization with the bispecific antibody 1-20/4-18 compared to two control bispecific antibodies, each comprising a parental antibody arm and a control antibody arm, and compared to a mix of the two control bispecific antibodies. AbX and AbY are irrelevant control antibody arms, wherein AbX is PGDM1400 and AbY is A32. FIG. 76B shows virus neutralization with a combination of the parental antibodies and each of the parental antibodies. FIG. 76C shows virus neutralization with the bispecific antibody 1-20/4-18 compared to a combination of the parental antibodies. FIG. 76D shows potency of the bispecific antibody 1-20/4-18 and a mix of each parental monoclonal antibodies tested each at half of the amount of the corresponding bispecific antibody. The IC₅₀ of bispecific antibody 1-20/4-18 is 0.016 μg/ml. The IC₉₀ of bispecific antibody 1-20/4-18 is 0.077 μg/ml. The IC₅₀ of the combination of parental antibodies is 0.014 μg/ml. The IC₉₀ of the combination of the parental antibodies is 0.057 μg/ml. The comparative data are from a single experiment, while, the data in the summary table are averaged from multiple repeats.

[1101] FIGS. 77A-D show comparative evaluation of the bispecific antibody 1-20/5-24. FIG. 77A shows virus neutralization with the bispecific antibody 1-20/5-24 compared to two control bispecific antibodies, each comprising a parental antibody arm and a control antibody arm, and compared to a mix of the two control bispecific antibodies. AbX and AbY are irrelevant control antibody arms, wherein AbX is PGDM1400 and AbY is A32. FIG. 77B shows virus neutralization with a combination of the parental antibodies and each of the parental antibodies. FIG. 77C shows virus neutralization with the bispecific antibody 1-20/5-24 compared to a combination of the parental antibodies. FIG. 77D shows potency of the bispecific antibody 1-20/5-24 and a mix of each parental monoclonal antibodies tested each at half of the amount of the corresponding bispecific antibody. The IC₅₀ of bispecific antibody 1-20/5-24 is 0.012 μg/ml. The IC₉₀ of bispecific antibody 1-20/5-24 is 0.023 μg/ml. The IC₅₀ of the combination of parental antibodies is 0.004 μg/ml. The IC₉₀ of the combination of parental antibodies is 0.016 μg/ml. The comparative data are from a single experiment, while, the data in the summary table are averaged from multiple repeats.

[1102] FIGS. 78A-D show comparative evaluation of the bispecific antibody 2-30/1-68. FIG. 78A shows virus neutralization with the bispecific antibody 2-30/1-68 compared to two control bispecific antibodies, each comprising a parental antibody arm and a control antibody arm, and compared to a mix of the two control bispecific antibodies. AbX is an irrelevant control antibody arms, wherein AbX is PGDM1400. FIG. 78B shows virus neutralization with a combination of the parental antibodies and each of the parental antibodies. FIG. 78C shows virus neutralization with the bispecific antibody 2-30/1-68 compared to a combination of the parental antibodies. FIG. 78D shows potency of the bispecific antibody 2-30/1-68 and a mix of each parental monoclonal antibodies tested each at half of the amount of the corresponding bispecific antibody. The IC₅₀ of bispecific antibody 2-30/1-68 is 0.009 μg/ml. The IC₉₀ of bispecific antibody 2-30/1-68 is 0.034 μg/ml. The IC₅₀ of the combination of parental antibodies is 0.009 μg/ml. The IC₉₀ of the combination of parental antibodies is 0.086 μg/ml. The comparative data are from a single experiment, while, the data in the summary table are averaged from multiple repeats.

[1103] FIGS. 79A-D show comparative evaluation of the bispecific antibody 2-7/4-8 (39/51). FIG. 79A shows virus neutralization with the bispecific antibody 2-7/4-8 (39/51) compared to two control bispecific antibodies, each comprising a parental antibody arm and a control antibody arm, and compared to a mix of the two control bispecific antibodies. AbX is an irrelevant control antibody arms, wherein AbX is PGDM1400. FIG. 79B shows virus neutralization with a combination of the parental antibodies and each of the parental antibodies. FIG. 79C shows virus neutralization with the bispecific antibody 2-7/4-8 (39/51) compared to a combination of the parental antibodies. FIG. 79D shows potency of the bispecific antibody 2-7/4-8 (39/51) and a mix of each parental monoclonal antibodies tested each at half of the amount of the corresponding bispecific antibody. The IC₅₀ of bispecific antibody 2-7/4-8(39/51) is 0.0008 μg/ml. The IC₉₀ of bispecific antibody 2-7/4-8(39/51) is 0.002 μg/ml. The comparative data are from a single experiment, while, the data in the summary table are averaged from multiple repeats.

[1104] FIGS. 80A-D show comparative evaluation of the bispecific antibody 1-57/1-87. FIG. 80A shows virus neutralization with the bispecific antibody 1-57/1-87 compared to two control bispecific antibodies, each comprising a parental antibody arm and a control antibody arm, and compared to a mix of the two control bispecific antibodies. AbX is an irrelevant control antibody arms, wherein AbX is PGDM1400. FIG. 80B shows virus neutralization with a combination of the parental antibodies and each of the parental antibodies. FIG. 80C shows virus neutralization with the bispecific antibody 1-57/1-87 compared to a combination of the parental antibodies. FIG. 80D shows potency of the bispecific antibody 1-57/1-87 and a mix of each parental monoclonal antibodies tested each at half of the amount of the corresponding bispecific antibody. The IC₅₀ of bispecific antibody 1-57/1-87 is 0.0012 μg/ml. The IC₉₀ of bispecific antibody 1-57/1-87 is 0.002 μg/ml. The IC₅₀ of the combination of parental antibodies is 0.0012 μg/ml. The IC₉₀ of the combination of parental antibodies is 0.010 μg/ml. The comparative data are from a single experiment, while, the data in the summary table are averaged from multiple repeats.

[1105] FIG. 81 shows potency of additional bispecific antibodies.

### Example 16—Bispecific Against SARS-CoV-2 Variants

[1106] FIGS. 82A-B show neutralizing activities of engineered bispecific antibodies. FIG. 82A shows neutralizing activities against wild-type virus (WA1) at various antibody concentrations for bispecific antibodies 2-17/2-7, 1-57/5-7, 5-7/1-57, 2-7/5-7, 5-7/2-7. FIG. 82B shows antibody potency (IC₅₀ and IC₉₀) against wild-type virus (WA1) for bispecific antibodies 2-17/2-7 (control), 1-57/5-7, 5-7/1-57, 2-7/5-7, 5-7/2-7. The IC₅₀ of bispecific antibody 2-17/2-7 is 0.005˜0.008 μg/ml. The IC₉₀ of bispecific antibody 2-17/2-7 is 0.025˜0.055 μg/ml. The IC₅₀ of bispecific antibody 1-57/5-7 is 0.005 μg/ml. The IC₉₀ of bispecific antibody 1-57/5-7 is 0.037 μg/ml. The IC₅₀ of bispecific antibody 5-7/1-57 is 0.006 μg/ml. The IC₉₀ of bispecific antibody 5-7/1-57 is 0.054 μg/ml. The IC₅₀ of bispecific antibody 2-7/5-7 is 0.005 μg/ml. The IC₉₀ of bispecific antibody 2-7/5-7 is 0.020 μg/ml. The IC₅₀ of bispecific antibody 5-7/2-7 is 0.007 μg/ml. The IC₉₀ of bispecific antibody 5-7/2-7 is 0.049 μg/ml.

[1107] FIGS. 83A-B show 2-7/5-7 bispecific antibody and parental antibodies activities. FIG. 83A shows neutralizing activities against wild-type virus (WA1) at various antibody concentrations for bispecific antibody 2-7/5-7, parental antibodies 2-7, 5-7, and a combination of 2-7 and 5-7 parental antibodies. FIG. 83B shows IC₅₀ concentrations for bispecific antibody 2-7/5-7, parental antibodies 2-7, 5-7, and a combination of 2-7 and 5-7 parental antibodies. The IC₅₀ of parental antibody 2-7 is 0.009 μg/ml. The IC₅₀ of parental antibody 5-7 is 0.044 μg/ml.

The IC₅₀ of bispecific antibody 2-7/5-7 is 0.002 μg/ml. The IC₅₀ of the combination of parental antibodies 2-7 and 5-7 is 0.020 μg/ml.

[1108] FIGS. 84A-B show activities of bispecific antibody 2-7/5-7 against SARS-CoV-2 wild-type (WA1) and variant strains B1.1.7, B1.526, B1351, and P.1. FIG. 84A shows neutralization activity of bispecific antibody 2-7/5-7 against various SARS-CoV-2 strains at different antibody concentrations. The SARS-CoV-2 strains are WA1, B1.1.7, B1.351, B1.526, and P.1. FIG. 84B shows IC₅₀ and IC₉₀ concentrations for bispecific antibody 2-7/5-7 against various SARS-CoV-2 strains. The IC₅₀ for the bispecific antibody 2-7/5-7 against WA1 (wild-type strain) is 0.002 μg/ml. The IC₉₀ for the bispecific antibody 2-7/5-7 against WA1 (wild-type strain) is 0.019 μg/ml. The IC₅₀ for the bispecific antibody 2-7/5-7 against B1.1.7 is 0.002 μg/ml. The IC₉₀ for the bispecific antibody 2-7/5-7 against B1.1.7 is 0.011 μg/ml. The IC₅₀ for the bispecific antibody 2-7/5-7 against B1.526 is 0.002 μg/ml. The IC₉₀ for the bispecific antibody 2-7/5-7 against B1.526 is 0.01 μg/ml. The IC₅₀ for the bispecific antibody 2-7/5-7 against B1.351 is 0.025 μg/ml. The IC₉₀ for the bispecific antibody 2-7/5-7 against B1.351 is 0.156 μg/ml. The IC₅₀ for the bispecific antibody 2-7/5-7 against P.1 is 0.013 μg/ml. The IC₉₀ for the bispecific antibody 2-7/5-7 against P.1 is 0.188 μg/ml.

### Example 17—Bispecific 2-7/5-7 Antibody

[1109] FIGS. 85A-D show neutralization of pseudoviruses having mutations associated with SARS-CoV-2 variants with the bispecific 2-7/5-7 antibody. FIG. 85A shows antibody neutralization curves against circulating SARS-CoV-2 virus variants. FIG. 85B shows antibody potency against circulating SARS-CoV-2 virus variants. FIG. 85C shows antibody neutralization curves against SARS-CoV-2 variants with high frequency mutations. FIG. 85D shows antibody potency against SARS-CoV-2 variants with high frequency mutations.

[1110] FIGS. 86A-F show neutralization of pseudoviruses with SARS-CoV-2 mutations corresponding to “variants of concern” using the bispecific antibody 2-7/5-7. FIG. 86A shows antibody neutralization curves against B.1.1.7 (UK virus variant) with NTD mutations. FIG. 86B shows antibody potency against B.1.1.7 (UK virus variant) with NTD mutations. FIG. 86C shows antibody neutralization curves against B.1.352 (SA) virus variant with NTD mutations. FIG. 86D shows antibody potency against B.1.352 (SA) virus variant with NTD mutations. FIG. 86E shows antibody neutralization curves against P.1 (BZ) virus variant with NTD mutations. FIG. 86F shows antibody potency against P.1 (BZ) virus variant with NTD mutations.

[1111] FIGS. 87A-F show neutralization of pseudoviruses with SARS-CoV-2 mutations corresponding to “variants of interest” using the bispecific antibody 2-7/5-7. FIG. 87A shows antibody neutralization curves against B.1.427 (CA) virus variant with NTD mutations. FIG. 87B shows antibody potency against B.1.427 (CA) virus variant with NTD mutations. FIG. 87C shows antibody neutralization curves against B.1.526 (NY) variant with NTD mutations. FIG. 87D shows antibody potency against B.1.526 (NY) variant with NTD mutations. FIG. 87E show antibody neuralization curves against NJ variant with NTD mutations. FIG. 87F show antibody potency against NJ variant with NTD mutations.

[1112] FIG. 88 shows summary of bispecific antibody 2-7/5-7 activity against variants. 1050 is shown in circles. 1C90 is shown in squares.

[1113] FIGS. 89A-C shows neutralization activity of bispecific antibody 2-7/5-7 and parental 2-7 and 5-7 monoclonal antibodies against SARS-CoV-2 variants (live viruses). FIG. 89A shows the neutralization curve for bispecific antibody 2-7/5-7. FIG. 89B shows the neutralization curve for parental antibody 2-7. FIG. 89C shows the neutralization curve for parental antibody 5-7.

The application's sequence listing, which the Patent Office published only in electronic form, follows.

SEQUENCE LISTING (263 sequences)

SEQ ID NO: 1 - protein, 122 aa, Artificial Sequence
  Description of Artificial Sequence: Synthetic polypeptide
QVQLVQSGAEVKKPGASVKVSCKASGYTFTGYYMHWVRQAPGQGLEWMGWINPNSGGTNYTQMFQGRVTMTRDTSISTAYMEVSRLRSDDTAVYYCARDRSWAVVYYYMDVWGKGTTVTVSS

SEQ ID NO: 2 - protein, 110 aa, Artificial Sequence
  Description of Artificial Sequence: Synthetic polypeptide
QSALTQPPSASGSPGQSVTISCTGTSSDVGGYNYVSWYQQHPGKAPKLMIYEVSKRPSGVPDRFSGSKSGNTASLTVSGLQAEDEADYYCSSYAGSNNLVFGGGTKLTVL

SEQ ID NO: 3 - protein, 125 aa, Artificial Sequence
  Description of Artificial Sequence: Synthetic polypeptide
QVQLVQSGAEVKKAGSSVKVSCKASGGTFSSHTITWVRQAPGQGLEWMGRIIPILGIANYAQKFQGRVTITADKSTSTAYMELSSLRSEDTAVYYCASLQTVDTAIEKYYGMDVWGQGTTVTVSS

SEQ ID NO: 4 - protein, 106 aa, Artificial Sequence
  Description of Artificial Sequence: Synthetic polypeptide
SYELTQPPSVSVSPGQTASITCSGDKLGDKYACWYQQKPGQSPVLVIYQDNKRPSGIPERFSGSNSGNTATLTISGTQAMDEADYYCQAWDSSTAVFGGGTKLTVL

SEQ ID NO: 5 - protein, 129 aa, Artificial Sequence
  Description of Artificial Sequence: Synthetic polypeptide
QVQLVQSGAEVKKPGASVRVSCKASGYTFTGYYMHWVRQAPGQGLEWMGWINPISDGTNYAQKFQGWVTMTRDTSISTVYMELSRLRSDDTAVYYCARGGSRCSGGNCYGWAYDAFDIWGQGTMITVSS

SEQ ID NO: 6 - protein, 110 aa, Artificial Sequence
  Description of Artificial Sequence: Synthetic polypeptide
QSALTQPASVSGSPGQSITISCTGTSSDVGGYNFVSWYQQHPGKAPKLMIYDVSKRPSGVSNRFSGSKSGNTASLTISGLQAEDEADCYCSSYTSSSTFVFGTGTKVTVL

SEQ ID NO: 7 - protein, 121 aa, Artificial Sequence
  Description of Artificial Sequence: Synthetic polypeptide
EVQLVESGGGLVKPGGSLRLSCAASGFTFSSYSMNWVRQAPGKGLEWVSSISSSSSYIYYADSVKGRFTISRDNAKNSLYLQMNSLRAEDTAVYYCTRAGWELRLDAFDIWGQGTMVTVSS

SEQ ID NO: 8 - protein, 106 aa, Artificial Sequence
  Description of Artificial Sequence: Synthetic polypeptide
SSELTQDPAVSVALGQTVRITCQGDSLRSSYASWYQQKPGQAPILVIYDKNNRPSGIPDRFSGSSSGNTASLTITGAQAEDEADYYCNSRDSSGILFGGGTKLTVL

SEQ ID NO: 9 - protein, 121 aa, Artificial Sequence
  Description of Artificial Sequence: Synthetic polypeptide
QVQLVQSGAEVKKPGASVKVSCKVSGYTLIELSMHWVRQAPGKGLEWMGGFDPEDVETIYAQQFQGRVTMTEDTSTDTAYMELSSLRSEDTAVYYCATGWAYKSTWYFGYWGQGTLVTVSS

SEQ ID NO: 10 - protein, 109 aa, Artificial Sequence
  Description of Artificial Sequence: Synthetic polypeptide
QSALTQPPSASGSPGQSVTISCTGTSSDVGGYNYVSWYQQHPGKAPKLMIYEVSKRPSGVPDRFSGSKSGNTASLTVSGLQAEDEADYYCSSYAGSRMGFGGGTKLTVL

SEQ ID NO: 11 - protein, 131 aa, Artificial Sequence
  Description of Artificial Sequence: Synthetic polypeptide
EVQLVESGGGLVQPGRSLRLSCAASGFSFDDYAMHWVRQAPGKGLEWVSGISWNSGSIGYADSVKGRFTISRDNAKNSLYLQMNSLRAEDTALYYCAKGLVQDYDSSGYFFADRVSAFDIWGQGTMVTVSS

SEQ ID NO: 12 - protein, 107 aa, Artificial Sequence
  Description of Artificial Sequence: Synthetic polypeptide
DIQMTQSPSSLSASVGDRVTITCRASQSINSYLNWYQQKPGKAPKLLIYAASSLQSGVPSRFSGSGSGTDFTLTISSLQPEDFATYYCQQSYSTPLTFGGGTKVEIK

SEQ ID NO: 13 - protein, 122 aa, Artificial Sequence
  Description of Artificial Sequence: Synthetic polypeptide
SQITLKESGPTLVKPTQTLTLTCTFSGFSLSTSGVGVGWIRQPPGKALEWLALIYWDDDKRYSPSLKSRLTITKDTSKNQVVLTMTNMDPVDTATYYCAHHKIERIFDYWGQGTLVTVSSAS

SEQ ID NO: 14 - protein, 109 aa, Artificial Sequence
  Description of Artificial Sequence: Synthetic polypeptide
QSALAQPASVSGSPGQSITISCTGTSSDVGAYNYVSWYQQHPGKAPKLMIYDVSKRPSGVSNRFSGSKSGNTASLTISGLQAEDEADYYCSSYTTSSTVFGGGTKLTVL

SEQ ID NO: 15 - protein, 130 aa, Artificial Sequence
  Description of Artificial Sequence: Synthetic polypeptide
EVHLVESGGGLVQPGGSLRLSCAASGFTFSDHYMDWVRQAPGKGLEWVGRTRNKANSYTTEYAASVKGRFTISRDDAKNSLYLQMNSLKTEDTAVYYCARVHRWAYCINGVCFGAYSDYWGQGTLVTVSS

SEQ ID NO: 16 - protein, 108 aa, Artificial Sequence
  Description of Artificial Sequence: Synthetic polypeptide
EIVLTQSPGTLSLSPGERATLSCRASQSVSSSYLAWYQQKPGQAPRLLIYGASSRATGIPDRFSGSGSGTDFTLTISRLEPEDFAVYYCQQYGSSPSTFGQGTKLEIK

SEQ ID NO: 17 - protein, 117 aa, Artificial Sequence
  Description of Artificial Sequence: Synthetic polypeptide
EVQLVESGGGLIQPGGSLRLSCAASGLTVSSNYMSWVRQAPGKGLEWVSVIYSGGSTFYADSVKGRFTISRDNSKNTLYLQMNSLRAEDTAVYYCARDLFYYGMDVWGQGTTVTVSS

SEQ ID NO: 18 - protein, 106 aa, Artificial Sequence
  Description of Artificial Sequence: Synthetic polypeptide
DIQLTQSPSFLSASVGDRVTITCRASQGISSYLAWYQQKPGKAPKLLIYAASTLQSGVPSRFSGSGSGTEFTLTISSLQPEDFATYYCQQLNSYPCFGPGTKVDIK

SEQ ID NO: 19 - protein, 119 aa, Artificial Sequence
  Description of Artificial Sequence: Synthetic polypeptide
QVQLVESGGGVVQPGRSLRLSCAASGFTFSSYTMHWVRQAPGKGLEWVAAISYDGNNKYYADSVKGRFTISRDNSKNTLYLQMNSLRAEDTAVYYCARSILYGGGMDVWGQGTTVTVSS

SEQ ID NO: 20 - protein, 107 aa, Artificial Sequence
  Description of Artificial Sequence: Synthetic polypeptide
DIQLTQSPSSLSASVGDRVTITCRASQGISSYLAWYQQKPGQAPKLLIYAASTLQSGVPSRFSGSGSGTDFTLTISSLQPEDFATYYCQQLNSYPLTFGGGTKVEIK

SEQ ID NO: 21 - protein, 120 aa, Artificial Sequence
  Description of Artificial Sequence: Synthetic polypeptide
QVQLLQSGAEVKKPGASVKVSCKASGYSFTSYYMHWVRQAPGQGLEWMGIINPSGGGTTYAQKFQGRVTMTRDTSTSTVYMELSSLRSEDTAVYYCARPGGGSYQEFDYWGQGTLVTVSS

SEQ ID NO: 22 - protein, 108 aa, Artificial Sequence
  Description of Artificial Sequence: Synthetic polypeptide
DIQMTQSPSSLSASVGDRVTITCRASQSISSYLNWYQQKPGKAPKLLISAASSLQSGVPSRFSGSGSGTDFTLTISSLQPEDFATYYCQQSYNTLQVTFGGGTKVEIK

SEQ ID NO: 23 - protein, 122 aa, Artificial Sequence
  Description of Artificial Sequence: Synthetic polypeptide
QVQLVESGGGVVQPGRSLRLSCAASGFTFSSYGMHWVRQAPGKGLEWVAVISYDGSNKHYADSVKGRFTISRDNSKNTLYLQMNSLRAEDTAVYYCAKDSGYNYGYSWFDPWGQGTLVTVSS

SEQ ID NO: 24 - protein, 110 aa, Artificial Sequence
  Description of Artificial Sequence: Synthetic polypeptide
SYELTQPPSVSVSPGQTARITCSADALAKQYAYWYQQKPGQAPVLVIYKDSERPSGIPERFSGSSSGTTVTLTISGVQAEDEADYYCQSTDNSGTYPNWVFGGGTKLTVL

SEQ ID NO: 25 - protein, 129 aa, Artificial Sequence
  Description of Artificial Sequence: Synthetic polypeptide
QVQLVESGGGVVQPGRSLRLSCAASGLTFSSYVMHWVRQAPGKGLDWVGVIWYDGSKKYYADSVKGRFTISRDNSKNTLYLQMNSLRAEDTAVYYCARDPRDYYDFWSGYDYYYGLDVWGQGTTVTVSS

SEQ ID NO: 26 - protein, 109 aa, Artificial Sequence
  Description of Artificial Sequence: Synthetic polypeptide
EIVLTQSPGILSLSPGERATLSCRASQSVSSSYLAWYQQKPGQAPRLLIYGASSRATGIPDRFSGSGSGTDFTLTISRLEPEDFAVYYCQQYGSSGALTFGGGTKVEIK

SEQ ID NO: 27 - protein, 134 aa, Artificial Sequence
  Description of Artificial Sequence: Synthetic polypeptide
QVQLVQSGAEVKKPGASVKVSCKASGYTFTSYYMHWVRQAPGQGLEWMGVINPSGGSTSYAEKFRGRVTMTRDTSTSTVYMELSSLRSEDTAVYYCARDREPHSDSSGYWDSLKYYYYYALDVWGQGTTVTVSS

SEQ ID NO: 28 - protein, 107 aa, Artificial Sequence
  Description of Artificial Sequence: Synthetic polypeptide
AIQLTQSPSSLSASVGDRVTITCRASQGISSYLAWYQQKPGKAPELLIYAASTLQSGVPSRFSGSGSGTDFTLTISSLQPEDFATYYCQQLNTYPFTFGPGTKVDIK

SEQ ID NO: 29 - protein, 128 aa, Artificial Sequence
  Description of Artificial Sequence: Synthetic polypeptide
QVQLVQSGAEVKKPGASVKVSCKVSGYTLIELSMHWVRQAPGKGLEWMGGFDPEDAETIYAQKFQGRVTMTEDTSTDTAYMELSSLRSEDTAVYYCATGWAVAGSSDVWYYYYGMDVWGQGTTVTVSS

SEQ ID NO: 30 - protein, 110 aa, Artificial Sequence
  Description of Artificial Sequence: Synthetic polypeptide
QSALTQPPSVSGSPGQSVTISCTGTSSDVGSYNRVSWYQQPPGTAPKLMIYEVSNRPSGVPDRFSGSKSGNTASLTISGLQAEDEADYYCSSYTSSSTYVFGTGTKVTVL

SEQ ID NO: 31 - protein, 129 aa, Artificial Sequence
  Description of Artificial Sequence: Synthetic polypeptide
QVQLVQSGAEVKKPGASVKVSCKASGYTFTGYYMHWVRQAPGQGLEWMGWINPNSGGTNYAQKFQGRVTMTRDTSITTAYMELRRLRSDDTAVYYCARGLGVGCSGGNCYLDYYYMDVWGKGTTVTVSS

SEQ ID NO: 32 - protein, 110 aa, Artificial Sequence
  Description of Artificial Sequence: Synthetic polypeptide
QSALTQPASVSGSPGQSITISCTGTSSDVGGYNYVSWYQQHPGKAPKLMIYDVSKRPSGVSNRFSGSKSGNTASLTISGLQAEDEGDYYCSSYTSSSTWVFGGGTKLTVL

SEQ ID NO: 33 - protein, 126 aa, Artificial Sequence
  Description of Artificial Sequence: Synthetic polypeptide
QVQLQESGPGLVKPSETLSLTCTVSGGSISNYYWSWIRQSPGKGLEWIGYIYYSGSTNYNPSLKSRVTISVDTSKNQFSLKLSSVTAADTAVYYCARSAKHWLAPPGDYYYYMDVWGKGTTVTVSS

SEQ ID NO: 34 - protein, 106 aa, Artificial Sequence
  Description of Artificial Sequence: Synthetic polypeptide
DIQLTQSPSFLSASVGDRVTITCRASQGISSYLAWYQQKPGKAPKLLIYAASTLQSGVPSRFSGSGSGTEFTLTISSLQPEDFATYYCQQLNSYLTFGGGTKVEIK

SEQ ID NO: 35 - protein, 124 aa, Artificial Sequence
  Description of Artificial Sequence: Synthetic polypeptide
QVQLVQSGAEVKKPGSSVKVSCKASGGTFSSYAISWVRQAPGQGLEWMGGNIPIFGTANYAQKFQGRVTITADESTSTAYMELSSLRSEDTAVYYCARGVGYRGVIPLNWFDPWGQGTVVTVSS

SEQ ID NO: 36 - protein, 108 aa, Artificial Sequence
  Description of Artificial Sequence: Synthetic polypeptide
EIVMTQSPATLSVSPGERATLSCRASQSVSSDLAWYQHKPGQAPRLLIYGASTRATGIPVRFSGSGSGTEFTLTISSLQSEDFAVYYCQQYNNWPPFTFGGGTKVEIK

SEQ ID NO: 37 - protein, 128 aa, Artificial Sequence
  Description of Artificial Sequence: Synthetic polypeptide
QVQLQESGPGLVKPSETLSLTCTVSGGSVSSSNYYWSWIRQPPGKGLEWIGYMYYSGSTKYNPSLKSRVTISVDTSKNQFSLKLSSVTAADTAVYYCAREVYYYDRSGYYASDGFDIWGQGTMVTVSS

SEQ ID NO: 38 - protein, 108 aa, Artificial Sequence
  Description of Artificial Sequence: Synthetic polypeptide
EIVLTQSPGTLSLSPGERATLSCRASQSVSSSYLAWYQQKPGQAPRLLIYGASSRATGIPDRFSGSGSGTDFTLTISRLEPEDFAVYYCQQYGSSPQTFGQGTKVEIK

SEQ ID NO: 39 - protein, 128 aa, Artificial Sequence
  Description of Artificial Sequence: Synthetic polypeptide
QVQLVQSGAEVKKPGASVKVSCKVSGYTLIELSMHWVRQAPGKGLEWMGGFDPEDAETIYAQKFQGRVTMTEDTSTDTAYMELSSLRSEDTAVYYCATGIAVIGPPPSTYYYYGMDVWGQGTTVTVSS

SEQ ID NO: 40 - protein, 110 aa, Artificial Sequence
  Description of Artificial Sequence: Synthetic polypeptide
QSALTQPASVSGSPGQSITISCTGTSSDVGGYNYVSWYQQHPGKAPKLMIYDVSKRPSGVSNRFSGSKSGNTASLTISGLQAEDEADYYCSSYTSSSTYVFGTGTKVTVL

SEQ ID NO: 41 - protein, 129 aa, Artificial Sequence; identical to SEQ ID NO: 5
  Description of Artificial Sequence: Synthetic polypeptide

SEQ ID NO: 42 - protein, 110 aa, Artificial Sequence
  Description of Artificial Sequence: Synthetic polypeptide
QSALTQPASVSGSPGQSITISCTGTSSDVGGYNFVSWYQQHPGKAPKLMIYDVSKRPSGVSNRFSGSKSGNTASLTISGLQAEDEADSYCSSYTSSSTFVFGTGTKVTVL

SEQ ID NO: 43 - protein, 125 aa, Artificial Sequence
  Description of Artificial Sequence: Synthetic polypeptide
QVQLVQSGAEVKKAGSSVKVSCKASGGTFSSHTITWVRLAPGQGLEWMGRNIPILGIANYAQKFQGRVTITADKSTSTAYMELSSLRSEDTAVYYCASLQTVDTAIEKYYGMDVWGQGTTVTVSS

SEQ ID NO: 44 - protein, 106 aa, Artificial Sequence; identical to SEQ ID NO: 4
  Description of Artificial Sequence: Synthetic polypeptide

SEQ ID NO: 45 - protein, 125 aa, Artificial Sequence
  Description of Artificial Sequence: Synthetic polypeptide
QVQLVQSGAEVKKAGSSVKVSCKASGGTFSSHTITWVRLAPGQGLEWMGRNIPILGTANYAQKFQGRVTITADKSTSTAYMELSSLRSEDTAVYYCASLQTVDTAIEKYYGMDVWGQGTTVTVSS

SEQ ID NO: 46 - protein, 106 aa, Artificial Sequence; identical to SEQ ID NO: 4
  Description of Artificial Sequence: Synthetic polypeptide

SEQ ID NO: 47 - protein, 458 aa, Artificial Sequence
  Description of Artificial Sequence: Synthetic polypeptide
QVQLVQSGAEVKKPGSSVKVSCKASGGTFSSYAISWVRQAPGQGLEWMGGNIPIFGTANYAQKFQGRVTITADESTSTAYMELSSLRSEDTAVYYCARGVGYRGVIPLNWFDPWGQGTVVTVSSASTAAPSVFIFPPSDEQLKSGTASVVCLLNNFYPREAKVQWKVDNALQSGNSQESVTEQDSKDSTYSLSSTLTLSKADYEKHKVYACEVTHQGLSSPVTKSFNRGECDKTHTCPPCPAPEFEGGPSVFLFPPKPKDTLMISRTPEVTCVVVDVSHEDPEVKFNWYVDGVEVHNAKTKPREEQYNSTYRVVSVLTVLHQDWLNGKEYKCKVSNKALPASIEKTISKAKGQPREPQVCTLPPSRDELTKNQVSLSCAVKGFYPSDIAVEWESNGQPENNYKTTPPVLDSDGSFFLVSKLTVDKSRWQQGNVFSCSVLHEALHSHYTQKSLSLSPGK

SEQ ID NO: 48 - protein, 213 aa, Artificial Sequence
  Description of Artificial Sequence: Synthetic polypeptide
EIVMTQSPATLSVSPGERATLSCRASQSVSSDLAWYQHKPGQAPRLLIYGASTRATGIPVRFSGSGSGTEFTLTISSLQSEDFAVYYCQQYNNWPPFTFGGGTKVEIKSSASTKGPSVFPLAPSSKSTSGGTAALGCLVKDYFPEPVTVSWNSGALTSGVHTFPAVLQSSGLYSLSSVVTVPSSSLGTQTYICNVNHKPSNTKVDKKVEPKSC

SEQ ID NO: 49 - protein, 449 aa, Artificial Sequence
  Description of Artificial Sequence: Synthetic polypeptide
QITLKESGPTLVKPTQTLTLTCTFSGFSLSTSGVGVGWIRQPPGKALEWLALIYWDDDKRYSPSLKSRLTITKDTSKNQVVLTMTNMDPVDTATYYCAHHKIERIFDYWGQGTLVTVSSASTKGPSVFPLAPSSKSTSGGTAALGCLVKDYFPEPVTVSWNSGALTSGVHTFPAVLQSSGLYSLSSVVTVPSSSLGTQTYICNVNHKPSNTKVDKKVEPKSCDKTHTCPPCPAPEFEGGPSVFLFPPKPKDTLMISRTPEVTCVVVDVSHEDPEVKFNWYVDGVEVHNAKTKPREEQYNSTYRVVSVLTVLHQDWLNGKEYKCKVSNKALPASIEKTISKAKGQPREPQVYTLPPCRDELTKNQVSLWCLVKGFYPSDIAVEWESNGQPENNYKTTPPVLDSDGSFFLYSKLTVDKSRWQQGNVFSCSVLHEALHSHYTQKSLSLSPGK

SEQ ID NO: 50 - protein, 215 aa, Artificial Sequence
  Description of Artificial Sequence: Synthetic polypeptide
QSALAQPASVSGSPGQSITISCTGTSSDVGAYNYVSWYQQHPGKAPKLMIYDVSKRPSGVSNRFSGSKSGNTASLTISGLQAEDEADYYCSSYTTSSTVFGGGTKLTVLGQPKAAPSVTLFPPSSEELQANKATLVCLISDFYPGAVTVAWKADSSPVKAGVETTTPSKQSNNKYAASSYLSLTPEQWKSHRSYSCQVTHEGSTVEKTVAPTECS

SEQ ID NO: 51 - protein, 464 aa, Artificial Sequence
  Description of Artificial Sequence: Synthetic polypeptide
EVHLVESGGGLVQPGGSLRLSCAASGFTFSDHYMDWVRQAPGKGLEWVGRTRNKANSYTTEYAASVKGRFTISRDDAKNSLYLQMNSLKTEDTAVYYCARVHRWAYCINGVCFGAYSDYWGQGTLVTVSSASTAAPSVFIFPPSDEQLKSGTASVVCLLNNFYPREAKVQWKVDNALQSGNSQESVTEQDSKDSTYSLSSTLTLSKADYEKHKVYACEVTHQGLSSPVTKSFNRGECDKTHTCPPCPAPEFEGGPSVFLFPPKPKDTLMISRTPEVTCVVVDVSHEDPEVKFNWYVDGVEVHNAKTKPREEQYNSTYRVVSVLTVLHQDWLNGKEYKCKVSNKALPASIEKTISKAKGQPREPQVCTLPPSRDELTKNQVSLSCAVKGFYPSDIAVEWESNGQPENNYKTTPPVLDSDGSFFLVSKLTVDKSRWQQGNVFSCSVLHEALHSHYTQKSLSLSPGK

SEQ ID NO: 52 - protein, 213 aa, Artificial Sequence
  Description of Artificial Sequence: Synthetic polypeptide
EIVLTQSPGTLSLSPGERATLSCRASQSVSSSYLAWYQQKPGQAPRLLIYGASSRATGIPDRFSGSGSGTDFTLTISRLEPEDFAVYYCQQYGSSPSTFGQGTKLEIKSSASTKGPSVFPLAPSSKSTSGGTAALGCLVKDYFPEPVTVSWNSGALTSGVHTFPAVLQSSGLYSLSSVVTVPSSSLGTQTYICNVNHKPSNTKVDKKVEPKSC

SEQ ID NO: 53 - protein, 464 aa, Artificial Sequence
  Description of Artificial Sequence: Synthetic polypeptide
QVQLVQSGAEVKKPGASVKVSCKASGYTFTSYYMHWVRQAPGQGLEWMGVINPSGGSTSYAEKFRGRVTMTRDTSTSTVYMELSSLRSEDTAVYYCARDREPHSDSSGYWDSLKYYYYYALDVWGQGTTVTVSSASTKGPSVFPLAPSSKSTSGGTAALGCLVKDYFPEPVTVSWNSGALTSGVHTFPAVLQSSGLYSLSSVVTVPSSSLGTQTYICNVNHKPSNTKVDKKVEPKSCDKTHTCPPCPAPEFEGGPSVFLFPPKPKDTLMISRTPEVTCVVVDVSHEDPEVKFNWYVDGVEVHNAKTKPREEQYNSTYRVVSVLTVLHQDWLNGKEYKCKVSNKALPASIEKTISKAKGQPREPQVYTLPPCRDELTKNQVSLWCLVKGFYPSDIAVEWESNGQPENNYKTTPPVLDSDGSFFLYSKLTVDKSRWQQGNVFSCSVLHEALHSHYTQKSLSLSPGK

SEQ ID NO: 54 - protein, 214 aa, Artificial Sequence
  Description of Artificial Sequence: Synthetic polypeptide
AIQLTQSPSSLSASVGDRVTITCRASQGISSYLAWYQQKPGKAPELLIYAASTLQSGVPSRFSGSGSGTDFTLTISSLQPEDFATYYCQQLNTYPFTFGPGTKVDIKRTVAAPSVFIFPPSDEQLKSGTASVVCLLNNFYPREAKVQWKVDNALQSGNSQESVTEQDSKDSTYSLSSTLTLSKADYEKHKVYACEVTHQGLSSPVTKSFNRGEC

SEQ ID NO: 55 - protein, 468 aa, Artificial Sequence
  Description of Artificial Sequence: Synthetic polypeptide
QVQLVQSGAEVKKPGASVKVSCKASGYTFTSYYMHWVRQAPGQGLEWMGVINPSGGSTSYAEKFRGRVTMTRDTSTSTVYMELSSLRSEDTAVYYCARDREPHSDSSGYWDSLKYYYYYALDVWGQGTTVTVSSASTAAPSVFIFPPSDEQLKSGTASVVCLLNNFYPREAKVQWKVDNALQSGNSQESVTEQDSKDSTYSLSSTLTLSKADYEKHKVYACEVTHQGLSSPVTKSFNRGECDKTHTCPPCPAPEFEGGPSVFLFPPKPKDTLMISRTPEVTCVVVDVSHEDPEVKFNWYVDGVEVHNAKTKPREEQYNSTYRVVSVLTVLHQDWLNGKEYKCKVSNKALPASIEKTISKAKGQPREPQVCTLPPSRDELTKNQVSLSCAVKGFYPSDIAVEWESNGQPENNYKTTPPVLDSDGSFFLVSKLTVDKSRWQQGNVFSCSVLHEALHSHYTQKSLSLSPGK

SEQ ID NO: 56 - protein, 212 aa, Artificial Sequence
  Description of Artificial Sequence: Synthetic polypeptide
AIQLTQSPSSLSASVGDRVTITCRASQGISSYLAWYQQKPGKAPELLIYAASTLQSGVPSRFSGSGSGTDFTLTISSLQPEDFATYYCQQLNTYPFTFGPGTKVDIKSSASTKGPSVFPLAPSSKSTSGGTAALGCLVKDYFPEPVTVSWNSGALTSGVHTFPAVLQSSGLYSLSSVVTVPSSSLGTQTYICNVNHKPSNTKVDKKVEPKSC

SEQ ID NO: 57 - protein, 460 aa, Artificial Sequence
  Description of Artificial Sequence: Synthetic polypeptide
EVHLVESGGGLVQPGGSLRLSCAASGFTFSDHYMDWVRQAPGKGLEWVGRTRNKANSYTTEYAASVKGRFTISRDDAKNSLYLQMNSLKTEDTAVYYCARVHRWAYCINGVCFGAYSDYWGQGTLVTVSSASTKGPSVFPLAPSSKSTSGGTAALGCLVKDYFPEPVTVSWNSGALTSGVHTFPAVLQSSGLYSLSSVVTVPSSSLGTQTYICNVNHKPSNTKVDKKVEPKSCDKTHTCPPCPAPEFEGGPSVFLFPPKPKDTLMISRTPEVTCVVVDVSHEDPEVKFNWYVDGVEVHNAKTKPREEQYNSTYRVVSVLTVLHQDWLNGKEYKCKVSNKALPASIEKTISKAKGQPREPQVYTLPPCRDELTKNQVSLWCLVKGFYPSDIAVEWESNGQPENNYKTTPPVLDSDGSFFLYSKLTVDKSRWQQGNVFSCSVLHEALHSHYTQKSLSLSPGK

SEQ ID NO: 58 - protein, 215 aa, Artificial Sequence
  Description of Artificial Sequence: Synthetic polypeptide
EIVLTQSPGTLSLSPGERATLSCRASQSVSSSYLAWYQQKPGQAPRLLIYGASSRATGIPDRFSGSGSGTDFTLTISRLEPEDFAVYYCQQYGSSPSTFGQGTKLEIKRTVAAPSVFIFPPSDEQLKSGTASVVCLLNNFYPREAKVQWKVDNALQSGNSQESVTEQDSKDSTYSLSSTLTLSKADYEKHKVYACEVTHQGLSSPVTKSFNRGEC

SEQ ID NO: 59 - protein, 453 aa, Artificial Sequence
  Description of Artificial Sequence: Synthetic polypeptide
QITLKESGPTLVKPTQTLTLTCTFSGFSLSTSGVGVGWIRQPPGKALEWLALIYWDDDKRYSPSLKSRLTITKDTSKNQVVLTMTNMDPVDTATYYCAHHKIERIFDYWGQGTLVTVSSASTAAPSVFIFPPSDEQLKSGTASVVCLLNNFYPREAKVQWKVDNALQSGNSQESVTEQDSKDSTYSLSSTLTLSKADYEKHKVYACEVTHQGLSSPVTKSFNRGECDKTHTCPPCPAPEFEGGPSVFLFPPKPKDTLMISRTPEVTCVVVDVSHEDPEVKFNWYVDGVEVHNAKTKPREEQYNSTYRVVSVLTVLHQDWLNGKEYKCKVSNKALPASIEKTISKAKGQPREPQVCTLPPSRDELTKNQVSLSCAVKGFYPSDIAVEWESNGQPENNYKTTPPVLDSDGSFFLVSKLTVDKSRWQQGNVFSCSVLHEALHSHYTQKSLSLSPGK

SEQ ID NO: 60 - protein, 214 aa, Artificial Sequence
  Description of Artificial Sequence: Synthetic polypeptide
QSALAQPASVSGSPGQSITISCTGTSSDVGAYNYVSWYQQHPGKAPKLMIYDVSKRPSGVSNRFSGSKSGNTASLTISGLQAEDEADYYCSSYTTSSTVFGGGTKLTVLSSASTKGPSVFPLAPSSKSTSGGTAALGCLVKDYFPEPVTVSWNSGALTSGVHTFPAVLQSSGLYSLSSVVTVPSSSLGTQTYICNVNHKPSNTKVDKKVEPKSC

SEQ ID NO: 61 - protein, 464 aa, Artificial Sequence; identical to SEQ ID NO: 53
  Description of Artificial Sequence: Synthetic polypeptide

SEQ ID NO: 62 - protein, 214 aa, Artificial Sequence; identical to SEQ ID NO: 54
  Description of Artificial Sequence: Synthetic polypeptide

SEQ ID NO: 63 - protein, 468 aa, Artificial Sequence; identical to SEQ ID NO: 55
  Description of Artificial Sequence: Synthetic polypeptide

SEQ ID NO: 64 - protein, 212 aa, Artificial Sequence; identical to SEQ ID NO: 56
  Description of Artificial Sequence: Synthetic polypeptide

SEQ ID NO: 65 - protein, 449 aa, Artificial Sequence; identical to SEQ ID NO: 49
  Description of Artificial Sequence: Synthetic polypeptide

SEQ ID NO: 66 - protein, 215 aa, Artificial Sequence; identical to SEQ ID NO: 50
  Description of Artificial Sequence: Synthetic polypeptide

SEQ ID NO: 67 - protein, 458 aa, Artificial Sequence; identical to SEQ ID NO: 47
  Description of Artificial Sequence: Synthetic polypeptide

SEQ ID NO: 68 - protein, 213 aa, Artificial Sequence; identical to SEQ ID NO: 48
  Description of Artificial Sequence: Synthetic polypeptide

SEQ ID NO: 69 - protein, 460 aa, Artificial Sequence; identical to SEQ ID NO: 57
  Description of Artificial Sequence: Synthetic polypeptide

SEQ ID NO: 70 - protein, 215 aa, Artificial Sequence; identical to SEQ ID NO: 58
  Description of Artificial Sequence: Synthetic polypeptide

SEQ ID NO: 71 - protein, 458 aa, Artificial Sequence; identical to SEQ ID NO: 47
  Description of Artificial Sequence: Synthetic polypeptide

SEQ ID NO: 72 - protein, 213 aa, Artificial Sequence; identical to SEQ ID NO: 48
  Description of Artificial Sequence: Synthetic polypeptide

SEQ ID NO: 73 - protein, 459 aa, Artificial Sequence
  Description of Artificial Sequence: Synthetic polypeptide
QVQLVQSGAEVKKPGASVRVSCKASGYTFTGYYMHWVRQAPGQGLEWMGWINPISDGTNYAQKFQGWVTMTRDTSISTVYMELSRLRSDDTAVYYCARGGSRCSGGNCYGWAYDAFDIWGQGTMITVSSASTKGPSVFPLAPSSKSTSGGTAALGCLVKDYFPEPVTVSWNSGALTSGVHTFPAVLQSSGLYSLSSVVTVPSSSLGTQTYICNVNHKPSNTKVDKKVEPKSCDKTHTCPPCPAPEFEGGPSVFLFPPKPKDTLMISRTPEVTCVVVDVSHEDPEVKFNWYVDGVEVHNAKTKPREEQYNSTYRVVSVLTVLHQDWLNGKEYKCKVSNKALPASIEKTISKAKGQPREPQVYTLPPCRDELTKNQVSLWCLVKGFYPSDIAVEWESNGQPENNYKTTPPVLDSDGSFFLYSKLTVDKSRWQQGNVFSCSVLHEALHSHYTQKSLSLSPGK

SEQ ID NO: 74 - protein, 216 aa, Artificial Sequence
  Description of Artificial Sequence: Synthetic polypeptide
QSALTQPASVSGSPGQSITISCTGTSSDVGGYNFVSWYQQHPGKAPKLMIYDVSKRPSGVSNRFSGSKSGNTASLTISGLQAEDEADCYCSSYTSSSTFVFGTGTKVTVLGQPKAAPSVTLFPPSSEELQANKATLVCLISDFYPGAVTVAWKADSSPVKAGVETTTPSKQSNNKYAASSYLSLTPEQWKSHRSYSCQVTHEGSTVEKTVAPTECS

SEQ ID NO: 75 - protein, 458 aa, Artificial Sequence; identical to SEQ ID NO: 47
  Description of Artificial Sequence: Synthetic polypeptide

SEQ ID NO: 76 - protein, 213 aa, Artificial Sequence; identical to SEQ ID NO: 48
  Description of Artificial Sequence: Synthetic polypeptide

SEQ ID NO: 77 - protein, 449 aa, Artificial Sequence
  Description of Artificial Sequence: Synthetic polypeptide
QVQLVESGGGVVQPGRSLRLSCAASGFTFSSYTMHWVRQAPGKGLEWVAAISYDGNNKYYADSVKGRFTISRDNSKNTLYLQMNSLRAEDTAVYYCARSILYGGGMDVWGQGTTVTVSSASTKGPSVFPLAPSSKSTSGGTAALGCLVKDYFPEPVTVSWNSGALTSGVHTFPAVLQSSGLYSLSSVVTVPSSSLGTQTYICNVNHKPSNTKVDKKVEPKSCDKTHTCPPCPAPEFEGGPSVFLFPPKPKDTLMISRTPEVTCVVVDVSHEDPEVKFNWYVDGVEVHNAKTKPREEQYNSTYRVVSVLTVLHQDWLNGKEYKCKVSNKALPASIEKTISKAKGQPREPQVYTLPPCRDELTKNQVSLWCLVKGFYPSDIAVEWESNGQPENNYKTTPPVLDSDGSFFLYSKLTVDKSRWQQGNVFSCSVLHEALHSHYTQKSLSLSPGK

SEQ ID NO: 78 - protein, 214 aa, Artificial Sequence
  Description of Artificial Sequence: Synthetic polypeptide
DIQLTQSPSSLSASVGDRVTITCRASQGISSYLAWYQQKPGQAPKLLIYAASTLQSGVPSRFSGSGSGTDFTLTISSLQPEDFATYYCQQLNSYPLTFGGGTKVEIKRTVAAPSVFIFPPSDEQLKSGTASVVCLLNNFYPREAKVQWKVDNALQSGNSQESVTEQDSKDSTYSLSSTLTLSKADYEKHKVYACEVTHQGLSSPVTKSFNRGEC

SEQ ID NO: 79 - protein, 458 aa, Artificial Sequence; identical to SEQ ID NO: 47
  Description of Artificial Sequence: Synthetic polypeptide

SEQ ID NO: 80 - protein, 213 aa, Artificial Sequence; identical to SEQ ID NO: 48
  Description of Artificial Sequence: Synthetic polypeptide

SEQ ID NO: 81 - protein, 450 aa, Artificial Sequence
  Description of Artificial Sequence: Synthetic polypeptide
QVQLLQSGAEVKKPGASVKVSCKASGYSFTSYYMHWVRQAPGQGLEWMGIINPSGGGTTYAQKFQGRVTMTRDTSTSTVYMELSSLRSEDTAVYYCARPGGGSYQEFDYWGQGTLVTVSSASTKGPSVFPLAPSSKSTSGGTAALGCLVKDYFPEPVTVSWNSGALTSGVHTFPAVLQSSGLYSLSSVVTVPSSSLGTQTYICNVNHKPSNTKVDKKVEPKSCDKTHTCPPCPAPEFEGGPSVFLFPPKPKDTLMISRTPEVTCVVVDVSHEDPEVKFNWYVDGVEVHNAKTKPREEQYNSTYRVVSVLTVLHQDWLNGKEYKCKVSNKALPASIEKTISKAKGQPREPQVYTLPPCRDELTKNQVSLWCLVKGFYPSDIAVEWESNGQPENNYKTTPPVLDSDGSFFLYSKLTVDKSRWQQGNVFSCSVLHEALHSHYTQKSLSLSPGK

SEQ ID NO: 82 - protein, 215 aa, Artificial Sequence
  Description of Artificial Sequence: Synthetic polypeptide
DIQMTQSPSSLSASVGDRVTITCRASQSISSYLNWYQQKPGKAPKLLISAASSLQSGVPSRFSGSGSGTDFTLTISSLQPEDFATYYCQQSYNTLQVTFGGGTKVEIKRTVAAPSVFIFPPSDEQLKSGTASVVCLLNNFYPREAKVQWKVDNALQSGNSQESVTEQDSKDSTYSLSSTLTLSKADYEKHKVYACEVTHQGLSSPVTKSFNRGEC

SEQ ID NO: 83 - protein, 463 aa, Artificial Sequence
  Description of Artificial Sequence: Synthetic polypeptide
QVQLVESGGGVVQPGRSLRLSCAASGLTFSSYVMHWVRQAPGKGLDWVGVIWYDGSKKYYADSVKGRFTISRDNSKNTLYLQMNSLRAEDTAVYYCARDPRDYYDFWSGYDYYYGLDVWGQGTTVTVSSASTAAPSVFIFPPSDEQLKSGTASVVCLLNNFYPREAKVQWKVDNALQSGNSQESVTEQDSKDSTYSLSSTLTLSKADYEKHKVYACEVTHQGLSSPVTKSFNRGECDKTHTCPPCPAPEFEGGPSVFLFPPKPKDTLMISRTPEVTCVVVDVSHEDPEVKFNWYVDGVEVHNAKTKPREEQYNSTYRVVSVLTVLHQDWLNGKEYKCKVSNKALPASIEKTISKAKGQPREPQVCTLPPSRDELTKNQVSLSCAVKGFYPSDIAVEWESNGQPENNYKTTPPVLDSDGSFFLVSKLTVDKSRWQQGNVFSCSVLHEALHSHYTQKSLSLSPGK

SEQ ID NO: 84 - protein, 214 aa, Artificial Sequence
  Description of Artificial Sequence: Synthetic polypeptide
EIVLTQSPGILSLSPGERATLSCRASQSVSSSYLAWYQQKPGQAPRLLIYGASSRATGIPDRFSGSGSGTDFTLTISRLEPEDFAVYYCQQYGSSGALTFGGGTKVEIKSSASTKGPSVFPLAPSSKSTSGGTAALGCLVKDYFPEPVTVSWNSGALTSGVHTFPAVLQSSGLYSLSSVVTVPSSSLGTQTYICNVNHKPSNTKVDKKVEPKSC

SEQ ID NO: 85 - protein, 460 aa, Artificial Sequence; identical to SEQ ID NO: 57
  Description of Artificial Sequence: Synthetic polypeptide

SEQ ID NO: 86 - protein, 215 aa, Artificial Sequence; identical to SEQ ID NO: 58
  Description of Artificial Sequence: Synthetic polypeptide

SEQ ID NO: 87 - protein, 463 aa, Artificial Sequence; identical to SEQ ID NO: 83
  Description of Artificial Sequence: Synthetic polypeptide

SEQ ID NO: 88 - protein, 214 aa, Artificial Sequence; identical to SEQ ID NO: 84
  Description of Artificial Sequence: Synthetic polypeptide

SEQ ID NO: 89 - protein, 459 aa, Artificial Sequence; identical to SEQ ID NO: 73
  Description of Artificial Sequence: Synthetic polypeptide

SEQ ID NO: 90 - protein, 216 aa, Artificial Sequence; identical to SEQ ID NO: 74
  Description of Artificial Sequence: Synthetic polypeptide

SEQ ID NO: 91 - protein, 463 aa, Artificial Sequence; identical to SEQ ID NO: 83
  Description of Artificial Sequence: Synthetic polypeptide

SEQ ID NO: 92 - protein, 214 aa, Artificial Sequence; identical to SEQ ID NO: 84
  Description of Artificial Sequence: Synthetic polypeptide

SEQ ID NO: 93 - protein, 450 aa, Artificial Sequence; identical to SEQ ID NO: 81
  Description of Artificial Sequence: Synthetic polypeptide

SEQ ID NO: 94 - protein, 215 aa, Artificial Sequence; identical to SEQ ID NO: 82
  Description of Artificial Sequence: Synthetic polypeptide

SEQ ID NO: 95 - protein, 451 aa, Artificial Sequence
  Description of Artificial Sequence: Synthetic polypeptide
EVQLVESGGGLIQPGGSLRLSCAASGLTVSSNYMSWVRQAPGKGLEWVSVIYSGGSTFYADSVKGRFTISRDNSKNTLYLQMNSLRAEDTAVYYCARDLFYYGMDVWGQGTTVTVSSASTAAPSVFIFPPSDEQLKSGTASVVCLLNNFYPREAKVQWKVDNALQSGNSQESVTEQDSKDSTYSLSSTLTLSKADYEKHKVYACEVTHQGLSSPVTKSFNRGECDKTHTCPPCPAPEFEGGPSVFLFPPKPKDTLMISRTPEVTCVVVDVSHEDPEVKFNWYVDGVEVHNAKTKPREEQYNSTYRVVSVLTVLHQDWLNGKEYKCKVSNKALPASIEKTISKAKGQPREPQVCTLPPSRDELTKNQVSLSCAVKGFYPSDIAVEWESNGQPENNYKTTPPVLDSDGSFFLVSKLTVDKSRWQQGNVFSCSVLHEALHSHYTQKSLSLSPGK

SEQ ID NO: 96 - protein, 211 aa, Artificial Sequence
  Description of Artificial Sequence: Synthetic polypeptide
DIQLTQSPSFLSASVGDRVTITCRASQGISSYLAWYQQKPGKAPKLLIYAASTLQSGVPSRFSGSGSGTEFTLTISSLQPEDFATYYCQQLNSYPCFGPGTKVDIKSSASTKGPSVFPLAPSSKSTSGGTAALGCLVKDYFPEPVTVSWNSGALTSGVHTFPAVLQSSGLYSLSSVVTVPSSSLGTQTYICNVNHKPSNTKVDKKVEPKSC

SEQ ID NO: 97 - protein, 458 aa, Artificial Sequence
  Description of Artificial Sequence: Synthetic polypeptide
QVQLVQSGAEVKKPGASVKVSCKVSGYTLIELSMHWVRQAPGKGLEWMGGFDPEDAETIYAQKFQGRVTMTEDTSTDTAYMELSSLRSEDTAVYYCATGWAVAGSSDVWYYYYGMDVWGQGTTVTVSSASTKGPSVFPLAPSSKSTSGGTAALGCLVKDYFPEPVTVSWNSGALTSGVHTFPAVLQSSGLYSLSSVVTVPSSSLGTQTYICNVNHKPSNTKVDKKVEPKSCDKTHTCPPCPAPEFEGGPSVFLFPPKPKDTLMISRTPEVTCVVVDVSHEDPEVKFNWYVDGVEVHNAKTKPREEQYNSTYRVVSVLTVLHQDWLNGKEYKCKVSNKALPASIEKTISKAKGQPREPQVYTLPPCRDELTKNQVSLWCLVKGFYPSDIAVEWESNGQPENNYKTTPPVLDSDGSFFLYSKLTVDKSRWQQGNVFSCSVLHEALHSHYTQKSLSLSPGK

SEQ ID NO: 98 - protein, 216 aa, Artificial Sequence
  Description of Artificial Sequence: Synthetic polypeptide
QSALTQPPSVSGSPGQSVTISCTGTSSDVGSYNRVSWYQQPPGTAPKLMIYEVSNRPSGVPDRFSGSKSGNTASLTISGLQAEDEADYYCSSYTSSSTYVFGTGTKVTVLGQPKAAPSVTLFPPSSEELQANKATLVCLISDFYPGAVTVAWKADSSPVKAGVETTTPSKQSNNKYAASSYLSLTPEQWKSHRSYSCQVTHEGSTVEKTVAPTECS

SEQ ID NO: 99 - protein, 451 aa, Artificial Sequence; identical to SEQ ID NO: 95
  Description of Artificial Sequence: Synthetic polypeptide

SEQ ID NO: 100 - protein, 211 aa, Artificial Sequence; identical to SEQ ID NO: 96
  Description of Artificial Sequence: Synthetic polypeptide

SEQ ID NO: 101 - protein, 454 aa, Artificial Sequence
  Description of Artificial Sequence: Synthetic polypeptide
QVQLVQSGAEVKKPGSSVKVSCKASGGTFSSYAISWVRQAPGQGLEWMGGNIPIFGTANYAQKFQGRVTITADESTSTAYMELSSLRSEDTAVYYCARGVGYRGVIPLNWFDPWGQGTVVTVSSASTKGPSVFPLAPSSKSTSGGTAALGCLVKDYFPEPVTVSWNSGALTSGVHTFPAVLQSSGLYSLSSVVTVPSSSLGTQTYICNVNHKPSNTKVDKKVEPKSCDKTHTCPPCPAPEFEGGPSVFLFPPKPKDTLMISRTPEVTCVVVDVSHEDPEVKFNWYVDGVEVHNAKTKPREEQYNSTYRVVSVLTVLHQDWLNGKEYKCKVSNKALPASIEKTISKAKGQPREPQVYTLPPCRDELTKNQVSLWCLVKGFYPSDIAVEWESNGQPENNYKTTPPVLDSDGSFFLYSKLTVDKSRWQQGNVFSCSVLHEALHSHYTQKSLSLSPGK

SEQ ID NO: 102 - protein, 215 aa, Artificial Sequence
  Description of Artificial Sequence: Synthetic polypeptide
EIVMTQSPATLSVSPGERATLSCRASQSVSSDLAWYQHKPGQAPRLLIYGASTRATGIPVRFSGSGSGTEFTLTISSLQSEDFAVYYCQQYNNWPPFTFGGGTKVEIKRTVAAPSVFIFPPSDEQLKSGTASVVCLLNNFYPREAKVQWKVDNALQSGNSQESVTEQDSKDSTYSLSSTLTLSKADYEKHKVYACEVTHQGLSSPVTKSFNRGEC

SEQ ID NO: 103 - protein, 451 aa, Artificial Sequence; identical to SEQ ID NO: 95
  Description of Artificial Sequence: Synthetic polypeptide

SEQ ID NO: 104 - protein, 211 aa, Artificial Sequence; identical to SEQ ID NO: 96
  Description of Artificial Sequence: Synthetic polypeptide

SEQ ID NO: 105 - protein, 452 aa, Artificial Sequence
  Description of Artificial Sequence: Synthetic polypeptide
QVQLVESGGGVVQPGRSLRLSCAASGFTFSSYGMHWVRQAPGKGLEWVAVISYDGSNKHYADSVKGRFTISRDNSKNTLYLQMNSLRAEDTAVYYCAKDSGYNYGYSWFDPWGQGTLVTVSSASTKGPSVFPLAPSSKSTSGGTAALGCLVKDYFPEPVTVSWNSGALTSGVHTFPAVLQSSGLYSLSSVVTVPSSSLGTQTYICNVNHKPSNTKVDKKVEPKSCDKTHTCPPCPAPEFEGGPSVFLFPPKPKDTLMISRTPEVTCVVVDVSHEDPEVKFNWYVDGVEVHNAKTKPREEQYNSTYRVVSVLTVLHQDWLNGKEYKCKVSNKALPASIEKTISKAKGQPREPQVYTLPPCRDELTKNQVSLWCLVKGFYPSDIAVEWESNGQPENNYKTTPPVLDSDGSFFLYSKLTVDKSRWQQGNVFSCSVLHEALHSHYTQKSLSLSPGK

SEQ ID NO: 106 - protein, 216 aa, Artificial Sequence
  Description of Artificial Sequence: Synthetic polypeptide
SYELTQPPSVSVSPGQTARITCSADALAKQYAYWYQQKPGQAPVLVIYKDSERPSGIPERFSGSSSGTTVTLTISGVQAEDEADYYCQSTDNSGTYPNWVFGGGTKLTVLGQPKAAPSVTLFPPSSEELQANKATLVCLISDFYPGAVTVAWKADSSPVKAGVETTTPSKQSNNKYAASSYLSLTPEQWKSHRSYSCQVTHEGSTVEKTVAPTECS

SEQ ID NO: 107 - protein, 451 aa, Artificial Sequence; identical to SEQ ID NO: 95
  Description of Artificial Sequence: Synthetic polypeptide

SEQ ID NO: 108 - protein, 211 aa, Artificial Sequence; identical to SEQ ID NO: 96
  Description of Artificial Sequence: Synthetic polypeptide

SEQ ID NO: 109 - protein, 459 aa, Artificial Sequence
  Description of Artificial Sequence: Synthetic polypeptide
QVQLVESGGGVVQPGRSLRLSCAASGLTFSSYVMHWVRQAPGKGLDWVGVIWYDGSKKYYADSVKGRFTISRDNSKNTLYLQMNSLRAEDTAVYYCARDPRDYYDFWSGYDYYYGLDVWGQGTTVTVSSASTKGPSVFPLAPSSKSTSGGTAALGCLVKDYFPEPVTVSWNSGALTSGVHTFPAVLQSSGLYSLSSVVTVPSSSLGTQTYICNVNHKPSNTKVDKKVEPKSCDKTHTCPPCPAPEFEGGPSVFLFPPKPKDTLMISRTPEVTCVVVDVSHEDPEVKFNWYVDGVEVHNAKTKPREEQYNSTYRVVSVLTVLHQDWLNGKEYKCKVSNKALPASIEKTISKAKGQPREPQVYTLPPCRDELTKNQVSLWCLVKGFYPSDIAVEWESNGQPENNYKTTPPVLDSDGSFFLYSKLTVDKSRWQQGNVFSCSVLHEALHSHYTQKSLSLSPGK

SEQ ID NO: 110 - protein, 216 aa, Artificial Sequence
  Description of Artificial Sequence: Synthetic polypeptide
EIVLTQSPGILSLSPGERATLSCRASQSVSSSYLAWYQQKPGQAPRLLIYGASSRATGIPDRFSGSGSGTDFTLTISRLEPEDFAVYYCQQYGSSGALTFGGGTKVEIKRTVAAPSVFIFPPSDEQLKSGTASVVCLLNNFYPREAKVQWKVDNALQSGNSQESVTEQDSKDSTYSLSSTLTLSKADYEKHKVYACEVTHQGLSSPVTKSFNRGEC

SEQ ID NO: 111 - protein, 453 aa, Artificial Sequence; identical to SEQ ID NO: 59
  Description of Artificial Sequence: Synthetic polypeptide

SEQ ID NO: 112 - protein, 214 aa, Artificial Sequence; identical to SEQ ID NO: 60
  Description of Artificial Sequence: Synthetic polypeptide

SEQ ID NO: 113 - protein, 455 aa, Artificial Sequence
  Description of Artificial Sequence: Synthetic polypeptide
QVQLVQSGAEVKKAGSSVKVSCKASGGTFSSHTITWVRLAPGQGLEWMGRNIPILGTANYAQKFQGRVTITADKSTSTAYMELSSLRSEDTAVYYCASLQTVDTAIEKYYGMDVWGQGTTVTVSSASTKGPSVFPLAPSSKSTSGGTAALGCLVKDYFPEPVTVSWNSGALTSGVHTFPAVLQSSGLYSLSSVVTVPSSSLGTQTYICNVNHKPSNTKVDKKVEPKSCDKTHTCPPCPAPEFEGGPSVFLFPPKPKDTLMISRTPEVTCVVVDVSHEDPEVKFNWYVDGVEVHNAKTKPREEQYNSTYRVVSVLTVLHQDWLNGKEYKCKVSNKALPASIEKTISKAKGQPREPQVYTLPPCRDELTKNQVSLWCLVKGFYPSDIAVEWESNGQPENNYKTTPPVLDSDGSFFLYSKLTVDKSRWQQGNVFSCSVLHEALHSHYTQKSLSLSPGK

SEQ ID NO: 114 - protein, 212 aa, Artificial Sequence
  Description of Artificial Sequence: Synthetic polypeptide
SYELTQPPSVSVSPGQTASITCSGDKLGDKYACWYQQKPGQSPVLVIYQDNKRPSGIPERFSGSNSGNTATLTISGTQAMDEADYYCQAWDSSTAVFGGGTKLTVLGQPKAAPSVTLFPPSSEELQANKATLVCLISDFYPGAVTVAWKADSSPVKAGVETTTPSKQSNNKYAASSYLSLTPEQWKSHRSYSCQVTHEGSTVEKTVAPTECS

SEQ ID NO: 115 - protein, 458 aa, Artificial Sequence; identical to SEQ ID NO: 47
  Description of Artificial Sequence: Synthetic polypeptide

SEQ ID NO: 116 - protein, 213 aa, Artificial Sequence; identical to SEQ ID NO: 48
  Description of Artificial Sequence: Synthetic polypeptide

SEQ ID NO: 117 - protein, 458 aa, Artificial Sequence
  Description of Artificial Sequence: Synthetic polypeptide
QVQLQESGPGLVKPSETLSLTCTVSGGSVSSSNYYWSWIRQPPGKGLEWIGYMYYSGSTKYNPSLKSRVTISVDTSKNQFSLKLSSVTAADTAVYYCAREVYYYDRSGYYASDGFDIWGQGTMVTVSSASTKGPSVFPLAPSSKSTSGGTAALGCLVKDYFPEPVTVSWNSGALTSGVHTFPAVLQSSGLYSLSSVVTVPSSSLGTQTYICNVNHKPSNTKVDKKVEPKSCDKTHTCPPCPAPEFEGGPSVFLFPPKPKDTLMISRTPEVTCVVVDVSHEDPEVKFNWYVDGVEVHNAKTKPREEQYNSTYRVVSVLTVLHQDWLNGKEYKCKVSNKALPASIEKTISKAKGQPREPQVYTLPPCRDELTKNQVSLWCLVKGFYPSDIAVEWESNGQPENNYKTTPPVLDSDGSFFLYSKLTVDKSRWQQGNVFSCSVLHEALHSHYTQKSLSLSPGK

SEQ ID NO: 118 - protein, 215 aa, Artificial Sequence
  Description of Artificial Sequence: Synthetic polypeptide
EIVLTQSPGTLSLSPGERATLSCRASQSVSSSYLAWYQQKPGQAPRLLIYGASSRATGIPDRFSGSGSGTDFTLTISRLEPEDFAVYYCQQYGSSPQTFGQGTKVEIKRTVAAPSVFIFPPSDEQLKSGTASVVCLLNNFYPREAKVQWKVDNALQSGNSQESVTEQDSKDSTYSLSSTLTLSKADYEKHKVYACEVTHQGLSSPVTKSFNRGEC

SEQ ID NO: 119 - protein, 462 aa, Artificial Sequence
  Description of Artificial Sequence: Synthetic polypeptide
QVQLQESGPGLVKPSETLSLTCTVSGGSVSSSNYYWSWIRQPPGKGLEWIGYMYYSGSTKYNPSLKSRVTISVDTSKNQFSLKLSSVTAADTAVYYCAREVYYYDRSGYYASDGFDIWGQGTMVTVSSASTAAPSVFIFPPSDEQLKSGTASVVCLLNNFYPREAKVQWKVDNALQSGNSQESVTEQDSKDSTYSLSSTLTLSKADYEKHKVYACEVTHQGLSSPVTKSFNRGECDKTHTCPPCPAPEFEGGPSVFLFPPKPKDTLMISRTPEVTCVVVDVSHEDPEVKFNWYVDGVEVHNAKTKPREEQYNSTYRVVSVLTVLHQDWLNGKEYKCKVSNKALPASIEKTISKAKGQPREPQVCTLPPSRDELTKNQVSLSCAVKGFYPSDIAVEWESNGQPENNYKTTPPVLDSDGSFFLVSKLTVDKSRWQQGNVFSCSVLHEALHSHYTQKSLSLSPGK

SEQ ID NO: 120 - protein, 213 aa, Artificial Sequence
  Description of Artificial Sequence: Synthetic polypeptide
EIVLTQSPGTLSLSPGERATLSCRASQSVSSSYLAWYQQKPGQAPRLLIYGASSRATGIPDRFSGSGSGTDFTLTISRLEPEDFAVYYCQQYGSSPQTFGQGTKVEIKSSASTKGPSVFPLAPSSKSTSGGTAALGCLVKDYFPEPVTVSWNSGALTSGVHTFPAVLQSSGLYSLSSVVTVPSSSLGTQTYICNVNHKPSNTKVDKKVEPKSC

SEQ ID NO: 121 - protein, 458 aa, Artificial Sequence; identical to SEQ ID NO: 97
  Description of Artificial Sequence: Synthetic polypeptide

SEQ ID NO: 122 - protein, 216 aa, Artificial Sequence; identical to SEQ ID NO: 98
  Description of Artificial Sequence: Synthetic polypeptide

SEQ ID NO: 123 - protein, 462 aa, Artificial Sequence; identical to SEQ ID NO: 119
  Description of Artificial Sequence: Synthetic polypeptide

SEQ ID NO: 124 - protein, 213 aa, Artificial Sequence; identical to SEQ ID NO: 120
  Description of Artificial Sequence: Synthetic polypeptide

SEQ ID NO: 125 - protein, 452 aa, Artificial Sequence; identical to SEQ ID NO: 105
  Description of Artificial Sequence: Synthetic polypeptide

SEQ ID NO: 126 - protein, 216 aa, Artificial Sequence; identical to SEQ ID NO: 106
  Description of Artificial Sequence: Synthetic polypeptide

SEQ ID NO: 127 - protein, 453 aa, Artificial Sequence
  Description of Artificial Sequence: Synthetic polypeptide
QVQLVESGGGVVQPGRSLRLSCAASGFTFSSYTMHWVRQAPGKGLEWVAAISYDGNNKYYADSVKGRFTISRDNSKNTLYLQMNSLRAEDTAVYYCARSILYGGGMDVWGQGTTVTVSSASTAAPSVFIFPPSDEQLKSGTASVVCLLNNFYPREAKVQWKVDNALQSGNSQESVTEQDSKDSTYSLSSTLTLSKADYEKHKVYACEVTHQGLSSPVTKSFNRGECDKTHTCPPCPAPEFEGGPSVFLFPPKPKDTLMISRTPEVTCVVVDVSHEDPEVKFNWYVDGVEVHNAKTKPREEQYNSTYRVVSVLTVLHQDWLNGKEYKCKVSNKALPASIEKTISKAKGQPREPQVCTLPPSRDELTKNQVSLSCAVKGFYPSDIAVEWESNGQPENNYKTTPPVLDSDGSFFLVSKLTVDKSRWQQGNVFSCSVLHEALHSHYTQKSLSLSPGK

SEQ ID NO: 128 - protein, 212 aa, Artificial Sequence
  Description of Artificial Sequence: Synthetic polypeptide
DIQLTQSPSSLSASVGDRVTITCRASQGISSYLAWYQQKPGQAPKLLIYAASTLQSGVPSRFSGSGSGTDFTLTISSLQPEDFATYYCQQLNSYPLTFGGGTKVEIKSSASTKGPSVFPLAPSSKSTSGGTAALGCLVKDYFPEPVTVSWNSGALTSGVHTFPAVLQSSGLYSLSSVVTVPSSSLGTQTYICNVNHKPSNTKVDKKVEPKSC

SEQ ID NO: 129 - protein, 458 aa, Artificial Sequence; identical to SEQ ID NO: 97
  Description of Artificial Sequence: Synthetic polypeptide

SEQ ID NO: 130 - protein, 216 aa, Artificial Sequence; identical to SEQ ID NO: 98
  Description of Artificial Sequence: Synthetic polypeptide

SEQ ID NO: 131 - protein, 453 aa, Artificial Sequence; identical to SEQ ID NO: 127
  Description of Artificial Sequence: Synthetic polypeptide

SEQ ID NO: 132 - protein, 212 aa, Artificial Sequence; identical to SEQ ID NO: 128
  Description of Artificial Sequence: Synthetic polypeptide

SEQ ID NO: 133 - protein, 452 aa, Artificial Sequence; identical to SEQ ID NO: 105
  Description of Artificial Sequence: Synthetic polypeptide

SEQ ID NO: 134 - protein, 216 aa, Artificial Sequence; identical to SEQ ID NO: 106
  Description of Artificial Sequence: Synthetic polypeptide

SEQ ID NO: 135 - protein, 453 aa, Artificial Sequence; identical to SEQ ID NO: 59
  Description of Artificial Sequence: Synthetic polypeptide

SEQ ID NO: 136 - protein, 214 aa, Artificial Sequence; identical to SEQ ID NO: 60
  Description of Artificial Sequence: Synthetic polypeptide

SEQ ID NO: 137 - protein, 455 aa, Artificial Sequence
  Description of Artificial Sequence: Synthetic polypeptide
QVQLVQSGAEVKKAGSSVKVSCKASGGTFSSHTITWVRLAPGQGLEWMGRNIPILGIANYAQKFQGRVTITADKSTSTAYMELSSLRSEDTAVYYCASLQTVDTAIEKYYGMDVWGQGTTVTVSSASTKGPSVFPLAPSSKSTSGGTAALGCLVKDYFPEPVTVSWNSGALTSGVHTFPAVLQSSGLYSLSSVVTVPSSSLGTQTYICNVNHKPSNTKVDKKVEPKSCDKTHTCPPCPAPEFEGGPSVFLFPPKPKDTLMISRTPEVTCVVVDVSHEDPEVKFNWYVDGVEVHNAKTKPREEQYNSTYRVVSVLTVLHQDWLNGKEYKCKVSNKALPASIEKTISKAKGQPREPQVYTLPPCRDELTKNQVSLWCLVKGFYPSDIAVEWESNGQPENNYKTTPPVLDSDGSFFLYSKLTVDKSRWQQGNVFSCSVLHEALHSHYTQKSLSLSPGK

SEQ ID NO: 138 - protein, 212 aa, Artificial Sequence; identical to SEQ ID NO: 114
  Description of Artificial Sequence: Synthetic polypeptide

SEQ ID NO: 139 - protein, 464 aa, Artificial Sequence; identical to SEQ ID NO: 51
  Description of Artificial Sequence: Synthetic polypeptide

SEQ ID NO: 140 - protein, 213 aa, Artificial Sequence; identical to SEQ ID NO: 52
  Description of Artificial Sequence: Synthetic polypeptide

SEQ ID NO: 141 - protein, 458 aa, Artificial Sequence
  Description of Artificial Sequence: Synthetic polypeptide
QVQLVQSGAEVKKPGASVKVSCKVSGYTLIELSMHWVRQAPGKGLEWMGGFDPEDAETIYAQKFQGRVTMTEDTSTDTAYMELSSLRSEDTAVYYCATGIAVIGPPPSTYYYYGMDVWGQGTTVTVSSASTKGPSVFPLAPSSKSTSGGTAALGCLVKDYFPEPVTVSWNSGALTSGVHTFPAVLQSSGLYSLSSVVTVPSSSLGTQTYICNVNHKPSNTKVDKKVEPKSCDKTHTCPPCPAPEFEGGPSVFLFPPKPKDTLMISRTPEVTCVVVDVSHEDPEVKFNWYVDGVEVHNAKTKPREEQYNSTYRVVSVLTVLHQDWLNGKEYKCKVSNKALPASIEKTISKAKGQPREPQVYTLPPCRDELTKNQVSLWCLVKGFYPSDIAVEWESNGQPENNYKTTPPVLDSDGSFFLYSKLTVDKSRWQQGNVFSCSVLHEALHSHYTQKSLSLSPGK

SEQ ID NO: 142 - protein, 216 aa, Artificial Sequence
  Description of Artificial Sequence: Synthetic polypeptide
QSALTQPASVSGSPGQSITISCTGTSSDVGGYNYVSWYQQHPGKAPKLMIYDVSKRPSGVSNRFSGSKSGNTASLTISGLQAEDEADYYCSSYTSSSTYVFGTGTKVTVLGQPKAAPSVTLFPPSSEELQANKATLVCLISDFYPGAVTVAWKADSSPVKAGVETTTPSKQSNNKYAASSYLSLTPEQWKSHRSYSCQVTHEGSTVEKTVAPTECS

SEQ ID NO: 143 - protein, 464 aa, Artificial Sequence; identical to SEQ ID NO: 51
  Description of Artificial Sequence: Synthetic polypeptide

SEQ ID NO: 144 - protein, 213 aa, Artificial Sequence; identical to SEQ ID NO: 52
  Description of Artificial Sequence: Synthetic polypeptide

SEQ ID NO: 145 - protein, 455 aa, Artificial Sequence; identical to SEQ ID NO: 137
  Description of Artificial Sequence: Synthetic polypeptide

SEQ ID NO: 146 - protein, 212 aa, Artificial Sequence; identical to SEQ ID NO: 114
  Description of Artificial Sequence: Synthetic polypeptide

SEQ ID NO: 147 - protein, 453 aa, Artificial Sequence; identical to SEQ ID NO: 59
  Description of Artificial Sequence: Synthetic polypeptide

SEQ ID NO: 148 - protein, 214 aa, Artificial Sequence; identical to SEQ ID NO: 60
  Description of Artificial Sequence: Synthetic polypeptide

SEQ ID NO: 149 - protein, 451 aa, Artificial Sequence
  Description of Artificial Sequence: Synthetic polypeptide
QVQLVQSGAEVKKPGASVKVSCKVSGYTLIELSMHWVRQAPGKGLEWMGGFDPEDVETIYAQQFQGRVTMTEDTSTDTAYMELSSLRSEDTAVYYCATGWAYKSTWYFGYWGQGTLVTVSSASTKGPSVFPLAPSSKSTSGGTAALGCLVKDYFPEPVTVSWNSGALTSGVHTFPAVLQSSGLYSLSSVVTVPSSSLGTQTYICNVNHKPSNTKVDKKVEPKSCDKTHTCPPCPAPEFEGGPSVFLFPPKPKDTLMISRTPEVTCVVVDVSHEDPEVKFNWYVDGVEVHNAKTKPREEQYNSTYRVVSVLTVLHQDWLNGKEYKCKVSNKALPASIEKTISKAKGQPREPQVYTLPPCRDELTKNQVSLWCLVKGFYPSDIAVEWESNGQPENNYKTTPPVLDSDGSFFLYSKLTVDKSRWQQGNVFSCSVLHEALHSHYTQKSLSLSPGK

SEQ ID NO: 150 - protein, 215 aa, Artificial Sequence
  Description of Artificial Sequence: Synthetic polypeptide
QSALTQPPSASGSPGQSVTISCTGTSSDVGGYNYVSWYQQHPGKAPKLMIYEVSKRPSGVPDRFSGSKSGNTASLTVSGLQAEDEADYYCSSYAGSRMGFGGGTKLTVLGQPKAAPSVTLFPPSSEELQANKATLVCLISDFYPGAVTVAWKADSSPVKAGVETTTPSKQSNNKYAASSYLSLTPEQWKSHRSYSCQVTHEGSTVEKTVAPTECS

SEQ ID NO: 151 - protein, 463 aa, Artificial Sequence
  Description of Artificial Sequence: Synthetic polypeptide
QVQLVQSGAEVKKPGASVRVSCKASGYTFTGYYMHWVRQAPGQGLEWMGWINPISDGTNYAQKFQGWVTMTRDTSISTVYMELSRLRSDDTAVYYCARGGSRCSGGNCYGWAYDAFDIWGQGTMITVSSASTAAPSVFIFPPSDEQLKSGTASVVCLLNNFYPREAKVQWKVDNALQSGNSQESVTEQDSKDSTYSLSSTLTLSKADYEKHKVYACEVTHQGLSSPVTKSFNRGECDKTHTCPPCPAPEFEGGPSVFLFPPKPKDTLMISRTPEVTCVVVDVSHEDPEVKFNWYVDGVEVHNAKTKPREEQYNSTYRVVSVLTVLHQDWLNGKEYKCKVSNKALPASIEKTISKAKGQPREPQVCTLPPSRDELTKNQVSLSCAVKGFYPSDIAVEWESNGQPENNYKTTPPVLDSDGSFFLVSKLTVDKSRWQQGNVFSCSVLHEALHSHYTQKSLSLSPGK

SEQ ID NO: 152 - protein, 215 aa, Artificial Sequence
  Description of Artificial Sequence: Synthetic polypeptide
QSALTQPASVSGSPGQSITISCTGTSSDVGGYNFVSWYQQHPGKAPKLMIYDVSKRPSGVSNRFSGSKSGNTASLTISGLQAEDEADCYCSSYTSSSTFVFGTGTKVTVLSSASTKGPSVFPLAPSSKSTSGGTAALGCLVKDYFPEPVTVSWNSGALTSGVHTFPAVLQSSGLYSLSSVVTVPSSSLGTQTYICNVNHKPSNTKVDKKVEPKSC

SEQ ID NO: 153 - protein, 455 aa, Artificial Sequence; identical to SEQ ID NO: 137
  Description of Artificial Sequence: Synthetic polypeptide

SEQ ID NO: 154 - protein, 212 aa, Artificial Sequence; identical to SEQ ID NO: 114
  Description of Artificial Sequence: Synthetic polypeptide

SEQ ID NO: 155 - protein, 464 aa, Artificial Sequence; identical to SEQ ID NO: 51
  Description of Artificial Sequence: Synthetic polypeptide

SEQ ID NO: 156 - protein, 213 aa, Artificial Sequence; identical to SEQ ID NO: 52
  Description of Artificial Sequence: Synthetic polypeptide

SEQ ID NO: 157 - protein, 452 aa, Artificial Sequence; identical to SEQ ID NO: 105
  Description of Artificial Sequence: Synthetic polypeptide

SEQ ID NO: 158 - protein, 216 aa, Artificial Sequence; identical to SEQ ID NO: 106
  Description of Artificial Sequence: Synthetic polypeptide

SEQ ID NO: 159 - protein, 453 aa, Artificial Sequence; identical to SEQ ID NO: 59
  Description of Artificial Sequence: Synthetic polypeptide

SEQ ID NO: 160 - protein, 214 aa, Artificial Sequence; identical to SEQ ID NO: 60
  Description of Artificial Sequence: Synthetic polypeptide

SEQ ID NO: 161 - protein, 458 aa, Artificial Sequence; identical to SEQ ID NO: 97
  Description of Artificial Sequence: Synthetic polypeptide

SEQ ID NO: 162 - protein, 216 aa, Artificial Sequence; identical to SEQ ID NO: 98
  Description of Artificial Sequence: Synthetic polypeptide

SEQ ID NO: 163 - protein, 454 aa, Artificial Sequence
  Description of Artificial Sequence: Synthetic polypeptide
QVQLLQSGAEVKKPGASVKVSCKASGYSFTSYYMHWVRQAPGQGLEWMGIINPSGGGTTYAQKFQGRVTMTRDTSTSTVYMELSSLRSEDTAVYYCARPGGGSYQEFDYWGQGTLVTVSSASTAAPSVFIFPPSDEQLKSGTASVVCLLNNFYPREAKVQWKVDNALQSGNSQESVTEQDSKDSTYSLSSTLTLSKADYEKHKVYACEVTHQGLSSPVTKSFNRGECDKTHTCPPCPAPEFEGGPSVFLFPPKPKDTLMISRTPEVTCVVVDVSHEDPEVKFNWYVDGVEVHNAKTKPREEQYNSTYRVVSVLTVLHQDWLNGKEYKCKVSNKALPASIEKTISKAKGQPREPQVCTLPPSRDELTKNQVSLSCAVKGFYPSDIAVEWESNGQPENNYKTTPPVLDSDGSFFLVSKLTVDKSRWQQGNVFSCSVLHEALHSHYTQKSLSLSPGK

SEQ ID NO: 164 - protein, 213 aa, Artificial Sequence
  Description of Artificial Sequence: Synthetic polypeptide
DIQMTQSPSSLSASVGDRVTITCRASQSISSYLNWYQQKPGKAPKLLISAASSLQSGVPSRFSGSGSGTDFTLTISSLQPEDFATYYCQQSYNTLQVTFGGGTKVEIKSSASTKGPSVFPLAPSSKSTSGGTAALGCLVKDYFPEPVTVSWNSGALTSGVHTFPAVLQSSGLYSLSSVVTVPSSSLGTQTYICNVNHKPSNTKVDKKVEPKSC

SEQ ID NO: 165 - protein, 452 aa, Artificial Sequence; identical to SEQ ID NO: 105
  Description of Artificial Sequence: Synthetic polypeptide

SEQ ID NO: 166 - protein, 216 aa, Artificial Sequence; identical to SEQ ID NO: 106
  Description of Artificial Sequence: Synthetic polypeptide

SEQ ID NO: 167 - protein, 463 aa, Artificial Sequence; identical to SEQ ID NO: 151
  Description of Artificial Sequence: Synthetic polypeptide

SEQ ID NO: 168 - protein, 215 aa, Artificial Sequence
  Description of Artificial Sequence: Synthetic polypeptide
QSALTQPASVSGSPGQSITISCTGTSSDVGGYNFVSWYQQHPGKAPKLMIYDVSKRPSGVSNRFSGSKSGNTASLTISGLQAEDEADSYCSSYTSSSTFVFGTGTKVTVLSSASTKGPSVFPLAPSSKSTSGGTAALGCLVKDYFPEPVTVSWNSGALTSGVHTFPAVLQSSGLYSLSSVVTVPSSSLGTQTYICNVNHKPSNTKVDKKVEPKSC

SEQ ID NO: 169 - protein, 451 aa, Artificial Sequence; identical to SEQ ID NO: 149
  Description of Artificial Sequence: Synthetic polypeptide

SEQ ID NO: 170 - protein, 215 aa, Artificial Sequence; identical to SEQ ID NO: 150
  Description of Artificial Sequence: Synthetic polypeptide

SEQ ID NO: 171 - protein, 454 aa, Artificial Sequence; identical to SEQ ID NO: 163
  Description of Artificial Sequence: Synthetic polypeptide

SEQ ID NO: 172 - protein, 213 aa, Artificial Sequence; identical to SEQ ID NO: 164
  Description of Artificial Sequence: Synthetic polypeptide

SEQ ID NO: 173 - protein, 455 aa, Artificial Sequence; identical to SEQ ID NO: 137
  Description of Artificial Sequence: Synthetic polypeptide

SEQ ID NO: 174 - protein, 212 aa, Artificial Sequence; identical to SEQ ID NO: 114
  Description of Artificial Sequence: Synthetic polypeptide

SEQ ID NO: 175 - protein, 464 aa, Artificial Sequence; identical to SEQ ID NO: 51
  Description of Artificial Sequence: Synthetic polypeptide

SEQ ID NO: 176 - protein, 213 aa, Artificial Sequence; identical to SEQ ID NO: 52
  Description of Artificial Sequence: Synthetic polypeptide

SEQ ID NO: 177 - protein, 451 aa, Artificial Sequence; identical to SEQ ID NO: 149
  Description of Artificial Sequence: Synthetic polypeptide

SEQ ID NO: 178 - protein, 215 aa, Artificial Sequence; identical to SEQ ID NO: 150
  Description of Artificial Sequence: Synthetic polypeptide

SEQ ID NO: 179 - protein, 454 aa, Artificial Sequence; identical to SEQ ID NO: 163
  Description of Artificial Sequence: Synthetic polypeptide

SEQ ID NO: 180 - protein, 213 aa, Artificial Sequence; identical to SEQ ID NO: 164
  Description of Artificial Sequence: Synthetic polypeptide

SEQ ID NO: 181 - protein, 458 aa, Artificial Sequence; identical to SEQ ID NO: 141
  Description of Artificial Sequence: Synthetic polypeptide

SEQ ID NO: 182 - protein, 216 aa, Artificial Sequence; identical to SEQ ID NO: 142
  Description of Artificial Sequence: Synthetic polypeptide

SEQ ID NO: 183 - protein, 464 aa, Artificial Sequence; identical to SEQ ID NO: 51
  Description of Artificial Sequence: Synthetic polypeptide

SEQ ID NO: 184 - protein, 213 aa, Artificial Sequence; identical to SEQ ID NO: 52
  Description of Artificial Sequence: Synthetic polypeptide

SEQ ID NO: 185 - protein, 458 aa, Artificial Sequence; identical to SEQ ID NO: 97
  Description of Artificial Sequence: Synthetic polypeptide

SEQ ID NO: 186 - protein, 216 aa, Artificial Sequence; identical to SEQ ID NO: 98
  Description of Artificial Sequence: Synthetic polypeptide

SEQ ID NO: 187 - protein, 453 aa, Artificial Sequence
  Description of Artificial Sequence: Synthetic polypeptide
QITLKESGPTLVKPTQTLTLTCTFSGFSLSTSGVGVGWIRQPPGKALEWLALIYWDDDKRYSPSLKSRLTITKDTSKNQVVLTMTNMDPVDTATYYCAHHKIERIFDYWGQGTLVTVSSASTAAPSVFIFPPSDEQLKSGTASVVCLLNNFYPREAKVQWKVDNALQSGNSQESVTEQDSKDSTYSLSSTLTLSKADYEKHKVYACEVTHQGLSSPVTKSFNRGECDKTHTCPPCPAPELLGGPSVFLFPPKPKDTLMISRTPEVTCVVVDVSHEDPEVKFNWYVDGVEVHNAKTKPREEQYNSTYRVVSVLTVLHQDWLNGKEYKCKVSNKALPAPIEKTISKAKGQPREPQVCTLPPSRDELTKNQVSLSCAVKGFYPSDIAVEWESNGQPENNYKTTPPVLDSDGSFFLVSKLTVDKSRWQQGNVFSCSVLHEALHSHYTQKSLSLSPGK

SEQ ID NO: 188 - protein, 214 aa, Artificial Sequence; identical to SEQ ID NO: 60
  Description of Artificial Sequence: Synthetic polypeptide

SEQ ID NO: 189 - protein, 455 aa, Artificial Sequence
  Description of Artificial Sequence: Synthetic polypeptide
QVQLVQSGAEVKKAGSSVKVSCKASGGTFSSHTITWVRLAPGQGLEWMGRNIPILGTANYAQKFQGRVTITADKSTSTAYMELSSLRSEDTAVYYCASLQTVDTAIEKYYGMDVWGQGTTVTVSSASTKGPSVFPLAPSSKSTSGGTAALGCLVKDYFPEPVTVSWNSGALTSGVHTFPAVLQSSGLYSLSSVVTVPSSSLGTQTYICNVNHKPSNTKVDKKVEPKSCDKTHTCPPCPAPELLGGPSVFLFPPKPKDTLMISRTPEVTCVVVDVSHEDPEVKFNWYVDGVEVHNAKTKPREEQYNSTYRVVSVLTVLHQDWLNGKEYKCKVSNKALPAPIEKTISKAKGQPREPQVYTLPPCRDELTKNQVSLWCLVKGFYPSDIAVEWESNGQPENNYKTTPPVLDSDGSFFLYSKLTVDKSRWQQGNVFSCSVLHEALHSHYTQKSLSLSPGK

SEQ ID NO: 190 - protein, 212 aa, Artificial Sequence; identical to SEQ ID NO: 114
  Description of Artificial Sequence: Synthetic polypeptide

SEQ ID NO: 191 - protein, 458 aa, Artificial Sequence
  Description of Artificial Sequence: Synthetic polypeptide
QVQLVQSGAEVKKPGSSVKVSCKASGGTFSSYAISWVRQAPGQGLEWMGGNIPIFGTANYAQKFQGRVTITADESTSTAYMELSSLRSEDTAVYYCARGVGYRGVIPLNWFDPWGQGTVVTVSSASTAAPSVFIFPPSDEQLKSGTASVVCLLNNFYPREAKVQWKVDNALQSGNSQESVTEQDSKDSTYSLSSTLTLSKADYEKHKVYACEVTHQGLSSPVTKSFNRGECDKTHTCPPCPAPELLGGPSVFLFPPKPKDTLMISRTPEVTCVVVDVSHEDPEVKFNWYVDGVEVHNAKTKPREEQYNSTYRVVSVLTVLHQDWLNGKEYKCKVSNKALPAPIEKTISKAKGQPREPQVCTLPPSRDELTKNQVSLSCAVKGFYPSDIAVEWESNGQPENNYKTTPPVLDSDGSFFLVSKLTVDKSRWQQGNVFSCSVLHEALHSHYTQKSLSLSPGK

SEQ ID NO: 192 - protein, 213 aa, Artificial Sequence; identical to SEQ ID NO: 48
  Description of Artificial Sequence: Synthetic polypeptide

SEQ ID NO: 193 - protein, 458 aa, Artificial Sequence
  Description of Artificial Sequence: Synthetic polypeptide
QVQLQESGPGLVKPSETLSLTCTVSGGSVSSSNYYWSWIRQPPGKGLEWIGYMYYSGSTKYNPSLKSRVTISVDTSKNQFSLKLSSVTAADTAVYYCAREVYYYDRSGYYASDGFDIWGQGTMVTVSSASTKGPSVFPLAPSSKSTSGGTAALGCLVKDYFPEPVTVSWNSGALTSGVHTFPAVLQSSGLYSLSSVVTVPSSSLGTQTYICNVNHKPSNTKVDKKVEPKSCDKTHTCPPCPAPELLGGPSVFLFPPKPKDTLMISRTPEVTCVVVDVSHEDPEVKFNWYVDGVEVHNAKTKPREEQYNSTYRVVSVLTVLHQDWLNGKEYKCKVSNKALPAPIEKTISKAKGQPREPQVYTLPPCRDELTKNQVSLWCLVKGFYPSDIAVEWESNGQPENNYKTTPPVLDSDGSFFLYSKLTVDKSRWQQGNVFSCSVLHEALHSHYTQKSLSLSPGK

SEQ ID NO: 194 - protein, 215 aa, Artificial Sequence; identical to SEQ ID NO: 118
  Description of Artificial Sequence: Synthetic polypeptide

SEQ ID NO: 195 - protein, 462 aa, Artificial Sequence
  Description of Artificial Sequence: Synthetic polypeptide
QVQLQESGPGLVKPSETLSLTCTVSGGSVSSSNYYWSWIRQPPGKGLEWIGYMYYSGSTKYNPSLKSRVTISVDTSKNQFSLKLSSVTAADTAVYYCAREVYYYDRSGYYASDGFDIWGQGTMVTVSSASTAAPSVFIFPPSDEQLKSGTASVVCLLNNFYPREAKVQWKVDNALQSGNSQESVTEQDSKDSTYSLSSTLTLSKADYEKHKVYACEVTHQGLSSPVTKSFNRGECDKTHTCPPCPAPELLGGPSVFLFPPKPKDTLMISRTPEVTCVVVDVSHEDPEVKFNWYVDGVEVHNAKTKPREEQYNSTYRVVSVLTVLHQDWLNGKEYKCKVSNKALPAPIEKTISKAKGQPREPQVCTLPPSRDELTKNQVSLSCAVKGFYPSDIAVEWESNGQPENNYKTTPPVLDSDGSFFLVSKLTVDKSRWQQGNVFSCSVLHEALHSHYTQKSLSLSPGK

SEQ ID NO: 196 - protein, 213 aa, Artificial Sequence; identical to SEQ ID NO: 120
  Description of Artificial Sequence: Synthetic polypeptide

SEQ ID NO: 197 - protein, 458 aa, Artificial Sequence
  Description of Artificial Sequence: Synthetic polypeptide
QVQLVQSGAEVKKPGASVKVSCKVSGYTLIELSMHWVRQAPGKGLEWMGGFDPEDAETIYAQKFQGRVTMTEDTSTDTAYMELSSLRSEDTAVYYCATGWAVAGSSDVWYYYYGMDVWGQGTTVTVSSASTKGPSVFPLAPSSKSTSGGTAALGCLVKDYFPEPVTVSWNSGALTSGVHTFPAVLQSSGLYSLSSVVTVPSSSLGTQTYICNVNHKPSNTKVDKKVEPKSCDKTHTCPPCPAPELLGGPSVFLFPPKPKDTLMISRTPEVTCVVVDVSHEDPEVKFNWYVDGVEVHNAKTKPREEQYNSTYRVVSVLTVLHQDWLNGKEYKCKVSNKALPAPIEKTISKAKGQPREPQVYTLPPCRDELTKNQVSLWCLVKGFYPSDIAVEWESNGQPENNYKTTPPVLDSDGSFFLYSKLTVDKSRWQQGNVFSCSVLHEALHSHYTQKSLSLSPGK

SEQ ID NO: 198 - protein, 216 aa, Artificial Sequence; identical to SEQ ID NO: 98
  Description of Artificial Sequence: Synthetic polypeptide

SEQ ID NO: 199 - protein, 462 aa, Artificial Sequence; identical to SEQ ID NO: 195
  Description of Artificial Sequence: Synthetic polypeptide

SEQ ID NO: 200 - protein, 213 aa, Artificial Sequence; identical to SEQ ID NO: 120
  Description of Artificial Sequence: Synthetic polypeptide

SEQ ID NO: 201 - protein, 452 aa, Artificial Sequence
  Description of Artificial Sequence: Synthetic polypeptide
QVQLVESGGGVVQPGRSLRLSCAASGFTFSSYGMHWVRQAPGKGLEWVAVISYDGSNKHYADSVKGRFTISRDNSKNTLYLQMNSLRAEDTAVYYCAKDSGYNYGYSWFDPWGQGTLVTVSSASTKGPSVFPLAPSSKSTSGGTAALGCLVKDYFPEPVTVSWNSGALTSGVHTFPAVLQSSGLYSLSSVVTVPSSSLGTQTYICNVNHKPSNTKVDKKVEPKSCDKTHTCPPCPAPELLGGPSVFLFPPKPKDTLMISRTPEVTCVVVDVSHEDPEVKFNWYVDGVEVHNAKTKPREEQYNSTYRVVSVLTVLHQDWLNGKEYKCKVSNKALPAPIEKTISKAKGQPREPQVYTLPPCRDELTKNQVSLWCLVKGFYPSDIAVEWESNGQPENNYKTTPPVLDSDGSFFLYSKLTVDKSRWQQGNVFSCSVLHEALHSHYTQKSLSLSPGK

SEQ ID NO: 202 - protein, 216 aa, Artificial Sequence; identical to SEQ ID NO: 106
  Description of Artificial Sequence: Synthetic polypeptide

SEQ ID NO: 203 - protein, 453 aa, Artificial Sequence
  Description of Artificial Sequence: Synthetic polypeptide
QVQLVESGGGVVQPGRSLRLSCAASGFTFSSYTMHWVRQAPGKGLEWVAAISYDGNNKYYADSVKGRFTISRDNSKNTLYLQMNSLRAEDTAVYYCARSILYGGGMDVWGQGTTVTVSSASTAAPSVFIFPPSDEQLKSGTASVVCLLNNFYPREAKVQWKVDNALQSGNSQESVTEQDSKDSTYSLSSTLTLSKADYEKHKVYACEVTHQGLSSPVTKSFNRGECDKTHTCPPCPAPELLGGPSVFLFPPKPKDTLMISRTPEVTCVVVDVSHEDPEVKFNWYVDGVEVHNAKTKPREEQYNSTYRVVSVLTVLHQDWLNGKEYKCKVSNKALPAPIEKTISKAKGQPREPQVCTLPPSRDELTKNQVSLSCAVKGFYPSDIAVEWESNGQPENNYKTTPPVLDSDGSFFLVSKLTVDKSRWQQGNVFSCSVLHEALHSHYTQKSLSLSPGK

SEQ ID NO: 204 - protein, 212 aa, Artificial Sequence; identical to SEQ ID NO: 128
  Description of Artificial Sequence: Synthetic polypeptide

SEQ ID NO: 205 - protein, 458 aa, Artificial Sequence; identical to SEQ ID NO: 197
  Description of Artificial Sequence: Synthetic polypeptide

SEQ ID NO: 206 - protein, 216 aa, Artificial Sequence; identical to SEQ ID NO: 98
  Description of Artificial Sequence: Synthetic polypeptide

SEQ ID NO: 207 - protein, 453 aa, Artificial Sequence; identical to SEQ ID NO: 203
  Description of Artificial Sequence: Synthetic polypeptide

SEQ ID NO: 208 - protein, 212 aa, Artificial Sequence; identical to SEQ ID NO: 128
  Description of Artificial Sequence: Synthetic polypeptide

SEQ ID NO: 209 - protein, 452 aa, Artificial Sequence; identical to SEQ ID NO: 201
  Description of Artificial Sequence: Synthetic polypeptide

SEQ ID NO: 210 - protein, 216 aa, Artificial Sequence; identical to SEQ ID NO: 106
  Description of Artificial Sequence: Synthetic polypeptide

SEQ ID NO: 211 - protein, 453 aa, Artificial Sequence; identical to SEQ ID NO: 187
  Description of Artificial Sequence: Synthetic polypeptide

SEQ ID NO: 212 - protein, 214 aa, Artificial Sequence; identical to SEQ ID NO: 60
  Description of Artificial Sequence: Synthetic polypeptide

SEQ ID NO: 213 - protein, 455 aa, Artificial Sequence
  Description of Artificial Sequence: Synthetic polypeptide
QVQLVQSGAEVKKAGSSVKVSCKASGGTFSSHTITWVRLAPGQGLEWMGRNIPILGIANYAQKFQGRVTITADKSTSTAYMELSSLRSEDTAVYYCASLQTVDTAIEKYYGMDVWGQGTTVTVSSASTKGPSVFPLAPSSKSTSGGTAALGCLVKDYFPEPVTVSWNSGALTSGVHTFPAVLQSSGLYSLSSVVTVPSSSLGTQTYICNVNHKPSNTKVDKKVEPKSCDKTHTCPPCPAPELLGGPSVFLFPPKPKDTLMISRTPEVTCVVVDVSHEDPEVKFNWYVDGVEVHNAKTKPREEQYNSTYRVVSVLTVLHQDWLNGKEYKCKVSNKALPAPIEKTISKAKGQPREPQVYTLPPCRDELTKNQVSLWCLVKGFYPSDIAVEWESNGQPENNYKTTPPVLDSDGSFFLYSKLTVDKSRWQQGNVFSCSVLHEALHSHYTQKSLSLSPGK

SEQ ID NO: 214 - protein, 212 aa, Artificial Sequence; identical to SEQ ID NO: 114
  Description of Artificial Sequence: Synthetic polypeptide

SEQ ID NO: 215 - protein, 464 aa, Artificial Sequence
  Description of Artificial Sequence: Synthetic polypeptide
EVHLVESGGGLVQPGGSLRLSCAASGFTFSDHYMDWVRQAPGKGLEWVGRTRNKANSYTTEYAASVKGRFTISRDDAKNSLYLQMNSLKTEDTAVYYCARVHRWAYCINGVCFGAYSDYWGQGTLVTVSSASTAAPSVFIFPPSDEQLKSGTASVVCLLNNFYPREAKVQWKVDNALQSGNSQESVTEQDSKDSTYSLSSTLTLSKADYEKHKVYACEVTHQGLSSPVTKSFNRGECDKTHTCPPCPAPELLGGPSVFLFPPKPKDTLMISRTPEVTCVVVDVSHEDPEVKFNWYVDGVEVHNAKTKPREEQYNSTYRVVSVLTVLHQDWLNGKEYKCKVSNKALPAPIEKTISKAKGQPREPQVCTLPPSRDELTKNQVSLSCAVKGFYPSDIAVEWESNGQPENNYKTTPPVLDSDGSFFLVSKLTVDKSRWQQGNVFSCSVLHEALHSHYTQKSLSLSPGK

SEQ ID NO: 216 - protein, 213 aa, Artificial Sequence; identical to SEQ ID NO: 52
  Description of Artificial Sequence: Synthetic polypeptide

SEQ ID NO: 217 - protein, 458 aa, Artificial Sequence
  Description of Artificial Sequence: Synthetic polypeptide
QVQLVQSGAEVKKPGASVKVSCKVSGYTLIELSMHWVRQAPGKGLEWMGGFDPEDAETIYAQKFQGRVTMTEDTSTDTAYMELSSLRSEDTAVYYCATGIAVIGPPPSTYYYYGMDVWGQGTTVTVSSASTKGPSVFPLAPSSKSTSGGTAALGCLVKDYFPEPVTVSWNSGALTSGVHTFPAVLQSSGLYSLSSVVTVPSSSLGTQTYICNVNHKPSNTKVDKKVEPKSCDKTHTCPPCPAPELLGGPSVFLFPPKPKDTLMISRTPEVTCVVVDVSHEDPEVKFNWYVDGVEVHNAKTKPREEQYNSTYRVVSVLTVLHQDWLNGKEYKCKVSNKALPAPIEKTISKAKGQPREPQVYTLPPCRDELTKNQVSLWCLVKGFYPSDIAVEWESNGQPENNYKTTPPVLDSDGSFFLYSKLTVDKSRWQQGNVFSCSVLHEALHSHYTQKSLSLSPGK

SEQ ID NO: 218 - protein, 216 aa, Artificial Sequence; identical to SEQ ID NO: 142
  Description of Artificial Sequence: Synthetic polypeptide

SEQ ID NO: 219 - protein, 464 aa, Artificial Sequence; identical to SEQ ID NO: 215
  Description of Artificial Sequence: Synthetic polypeptide

SEQ ID NO: 220 - protein, 213 aa, Artificial Sequence; identical to SEQ ID NO: 52
  Description of Artificial Sequence: Synthetic polypeptide

SEQ ID NO: 221 - protein, 455 aa, Artificial Sequence; identical to SEQ ID NO: 213
  Description of Artificial Sequence: Synthetic polypeptide

SEQ ID NO: 222 - protein, 212 aa, Artificial Sequence; identical to SEQ ID NO: 114
  Description of Artificial Sequence: Synthetic polypeptide

SEQ ID NO: 223 - protein, 453 aa, Artificial Sequence; identical to SEQ ID NO: 187
  Description of Artificial Sequence: Synthetic polypeptide

SEQ ID NO: 224 - protein, 214 aa, Artificial Sequence; identical to SEQ ID NO: 60
  Description of Artificial Sequence: Synthetic polypeptide

SEQ ID NO: 225 - protein, 451 aa, Artificial Sequence
  Description of Artificial Sequence: Synthetic polypeptide
QVQLVQSGAEVKKPGASVKVSCKVSGYTLIELSMHWVRQAPGKGLEWMGGFDPEDVETIYAQQFQGRVTMTEDTSTDTAYMELSSLRSEDTAVYYCATGWAYKSTWYFGYWGQGTLVTVSSASTKGPSVFPLAPSSKSTSGGTAALGCLVKDYFPEPVTVSWNSGALTSGVHTFPAVLQSSGLYSLSSVVTVPSSSLGTQTYICNVNHKPSNTKVDKKVEPKSCDKTHTCPPCPAPELLGGPSVFLFPPKPKDTLMISRTPEVTCVVVDVSHEDPEVKFNWYVDGVEVHNAKTKPREEQYNSTYRVVSVLTVLHQDWLNGKEYKCKVSNKALPAPIEKTISKAKGQPREPQVYTLPPCRDELTKNQVSLWCLVKGFYPSDIAVEWESNGQPENNYKTTPPVLDSDGSFFLYSKLTVDKSRWQQGNVFSCSVLHEALHSHYTQKSLSLSPGK

SEQ ID NO: 226 - protein, 215 aa, Artificial Sequence; identical to SEQ ID NO: 150
  Description of Artificial Sequence: Synthetic polypeptide

SEQ ID NO: 227 - protein, 463 aa, Artificial Sequence
  Description of Artificial Sequence: Synthetic polypeptide
QVQLVQSGAEVKKPGASVRVSCKASGYTFTGYYMHWVRQAPGQGLEWMGWINPISDGTNYAQKFQGWVTMTRDTSISTVYMELSRLRSDDTAVYYCARGGSRCSGGNCYGWAYDAFDIWGQGTMITVSSASTAAPSVFIFPPSDEQLKSGTASVVCLLNNFYPREAKVQWKVDNALQSGNSQESVTEQDSKDSTYSLSSTLTLSKADYEKHKVYACEVTHQGLSSPVTKSFNRGECDKTHTCPPCPAPELLGGPSVFLFPPKPKDTLMISRTPEVTCVVVDVSHEDPEVKFNWYVDGVEVHNAKTKPREEQYNSTYRVVSVLTVLHQDWLNGKEYKCKVSNKALPAPIEKTISKAKGQPREPQVCTLPPSRDELTKNQVSLSCAVKGFYPSDIAVEWESNGQPENNYKTTPPVLDSDGSFFLVSKLTVDKSRWQQGNVFSCSVLHEALHSHYTQKSLSLSPGK

SEQ ID NO: 228 - protein, 215 aa, Artificial Sequence; identical to SEQ ID NO: 152
  Description of Artificial Sequence: Synthetic polypeptide

SEQ ID NO: 229 - protein, 455 aa, Artificial Sequence; identical to SEQ ID NO: 213
  Description of Artificial Sequence: Synthetic polypeptide

SEQ ID NO: 230 - protein, 212 aa, Artificial Sequence; identical to SEQ ID NO: 114
  Description of Artificial Sequence: Synthetic polypeptide

SEQ ID NO: 231 - protein, 464 aa, Artificial Sequence; identical to SEQ ID NO: 215
  Description of Artificial Sequence: Synthetic polypeptide

SEQ ID NO: 232 - protein, 213 aa, Artificial Sequence; identical to SEQ ID NO: 52
  Description of Artificial Sequence: Synthetic polypeptide

SEQ ID NO: 233 - protein, 452 aa, Artificial Sequence; identical to SEQ ID NO: 201
  Description of Artificial Sequence: Synthetic polypeptide

SEQ ID NO: 234 - protein, 216 aa, Artificial Sequence; identical to SEQ ID NO: 106
  Description of Artificial Sequence: Synthetic polypeptide

SEQ ID NO: 235 - protein, 453 aa, Artificial Sequence; identical to SEQ ID NO: 187
  Description of Artificial Sequence: Synthetic polypeptide

SEQ ID NO: 236 - protein, 214 aa, Artificial Sequence; identical to SEQ ID NO: 60
  Description of Artificial Sequence: Synthetic polypeptide

SEQ ID NO: 237 - protein, 458 aa, Artificial Sequence; identical to SEQ ID NO: 197
  Description of Artificial Sequence: Synthetic polypeptide

SEQ ID NO: 238 - protein, 216 aa, Artificial Sequence; identical to SEQ ID NO: 98
  Description of Artificial Sequence: Synthetic polypeptide

SEQ ID NO: 239 - protein, 454 aa, Artificial Sequence
  Description of Artificial Sequence: Synthetic polypeptide
QVQLLQSGAEVKKPGASVKVSCKASGYSFTSYYMHWVRQAPGQGLEWMGIINPSGGGTTYAQKFQGRVTMTRDTSTSTVYMELSSLRSEDTAVYYCARPGGGSYQEFDYWGQGTLVTVSSASTAAPSVFIFPPSDEQLKSGTASVVCLLNNFYPREAKVQWKVDNALQSGNSQESVTEQDSKDSTYSLSSTLTLSKADYEKHKVYACEVTHQGLSSPVTKSFNRGECDKTHTCPPCPAPELLGGPSVFLFPPKPKDTLMISRTPEVTCVVVDVSHEDPEVKFNWYVDGVEVHNAKTKPREEQYNSTYRVVSVLTVLHQDWLNGKEYKCKVSNKALPAPIEKTISKAKGQPREPQVCTLPPSRDELTKNQVSLSCAVKGFYPSDIAVEWESNGQPENNYKTTPPVLDSDGSFFLVSKLTVDKSRWQQGNVFSCSVLHEALHSHYTQKSLSLSPGK

SEQ ID NO: 240 - protein, 213 aa, Artificial Sequence; identical to SEQ ID NO: 164
  Description of Artificial Sequence: Synthetic polypeptide

SEQ ID NO: 241 - protein, 452 aa, Artificial Sequence; identical to SEQ ID NO: 201
  Description of Artificial Sequence: Synthetic polypeptide

SEQ ID NO: 242 - protein, 216 aa, Artificial Sequence; identical to SEQ ID NO: 106
  Description of Artificial Sequence: Synthetic polypeptide

SEQ ID NO: 243 - protein, 463 aa, Artificial Sequence; identical to SEQ ID NO: 227
  Description of Artificial Sequence: Synthetic polypeptide

SEQ ID NO: 244 - protein, 215 aa, Artificial Sequence; identical to SEQ ID NO: 168
  Description of Artificial Sequence: Synthetic polypeptide

SEQ ID NO: 245 - protein, 451 aa, Artificial Sequence; identical to SEQ ID NO: 225
  Description of Artificial Sequence: Synthetic polypeptide

SEQ ID NO: 246 - protein, 215 aa, Artificial Sequence; identical to SEQ ID NO: 150
  Description of Artificial Sequence: Synthetic polypeptide

SEQ ID NO: 247 - protein, 454 aa, Artificial Sequence; identical to SEQ ID NO: 239
  Description of Artificial Sequence: Synthetic polypeptide

SEQ ID NO: 248 - protein, 213 aa, Artificial Sequence; identical to SEQ ID NO: 164
  Description of Artificial Sequence: Synthetic polypeptide

SEQ ID NO: 249 - protein, 455 aa, Artificial Sequence; identical to SEQ ID NO: 213
  Description of Artificial Sequence: Synthetic polypeptide

SEQ ID NO: 250 - protein, 212 aa, Artificial Sequence; identical to SEQ ID NO: 114
  Description of Artificial Sequence: Synthetic polypeptide

SEQ ID NO: 251 - protein, 464 aa, Artificial Sequence; identical to SEQ ID NO: 215
  Description of Artificial Sequence: Synthetic polypeptide

SEQ ID NO: 252 - protein, 213 aa, Artificial Sequence; identical to SEQ ID NO: 52
  Description of Artificial Sequence: Synthetic polypeptide

SEQ ID NO: 253 - protein, 451 aa, Artificial Sequence; identical to SEQ ID NO: 225
  Description of Artificial Sequence: Synthetic polypeptide

SEQ ID NO: 254 - protein, 215 aa, Artificial Sequence; identical to SEQ ID NO: 150
  Description of Artificial Sequence: Synthetic polypeptide

SEQ ID NO: 255 - protein, 454 aa, Artificial Sequence; identical to SEQ ID NO: 239
  Description of Artificial Sequence: Synthetic polypeptide

SEQ ID NO: 256 - protein, 213 aa, Artificial Sequence; identical to SEQ ID NO: 164
  Description of Artificial Sequence: Synthetic polypeptide

SEQ ID NO: 257 - protein, 458 aa, Artificial Sequence; identical to SEQ ID NO: 217
  Description of Artificial Sequence: Synthetic polypeptide

SEQ ID NO: 258 - protein, 216 aa, Artificial Sequence; identical to SEQ ID NO: 142
  Description of Artificial Sequence: Synthetic polypeptide

SEQ ID NO: 259 - protein, 464 aa, Artificial Sequence; identical to SEQ ID NO: 215
  Description of Artificial Sequence: Synthetic polypeptide

SEQ ID NO: 260 - protein, 213 aa, Artificial Sequence; identical to SEQ ID NO: 52
  Description of Artificial Sequence: Synthetic polypeptide

SEQ ID NO: 261 - protein, 458 aa, Artificial Sequence; identical to SEQ ID NO: 197
  Description of Artificial Sequence: Synthetic polypeptide

SEQ ID NO: 262 - protein, 216 aa, Artificial Sequence; identical to SEQ ID NO: 98
  Description of Artificial Sequence: Synthetic polypeptide

SEQ ID NO: 263 - protein, 8 aa, Artificial Sequence
  Description of Artificial Sequence: Synthetic 8xHis tag
HHHHHHHH

1. A synthesized monoclonal antibody, or a functional fragment thereof, comprising a heavy chain having a variable domain and a constant domain and a light chain having a variable domain and a constant domain, wherein the antibody binds an antigen on a coronavirus particle.

2-7. (canceled)

8. The antibody of claim 1, wherein the heavy chain variable domain comprises a polypeptide sequence which is at least 60%, 62%, 65%, 67%, 70%, 72%, 75%, 77%, 80%, 82%, 85%, 87%, 90%, 92%, 95%, 97%, 98%, 99% identical to SEQ ID NO: 3 and the light chain variable domain comprises a polypeptide sequence which is at least 60%, 62%, 65%, 67%, 70%, 72%, 75%, 77%, 80%, 82%, 85%, 87%, 90%, 92%, 95%, 97%, 98%, 99% identical to SEQ ID NO: 4;
wherein the heavy chain variable domain comprises a polypeptide sequence which is at least 60%, 62%, 65%, 67%, 70%, 72%, 75%, 77%, 80%, 82%, 85%, 87%, 90%, 92%, 95%, 97%, 98%, 99% identical to SEQ ID NO: 7 and the light chain variable domain comprises a polypeptide sequence which is at least 60%, 62%, 65%, 67%, 70%, 72%, 75%, 77%, 80%, 82%, 85%, 87%, 90%, 92%, 95%, 97%, 98%, 99% identical to SEQ ID NO: 8;
wherein the heavy chain variable domain comprises a polypeptide sequence which is at least 60%, 62%, 65%, 67%, 70%, 72%, 75%, 77%, 80%, 82%, 85%, 87%, 90%, 92%, 95%, 97%, 98%, 99% identical to SEQ ID NO: 9 and the light chain variable domain comprises a polypeptide sequence which is at least 60%, 62%, 65%, 67%, 70%, 72%, 75%, 77%, 80%, 82%, 85%, 87%, 90%, 92%, 95%, 97%, 98%, 99% identical to SEQ ID NO: 10;
wherein the heavy chain variable domain comprises a polypeptide sequence which is at least 60%, 62%, 65%, 67%, 70%, 72%, 75%, 77%, 80%, 82%, 85%, 87%, 90%, 92%, 95%, 97%, 98%, 99% identical to SEQ ID NO: 11 and the light chain variable domain comprises a polypeptide sequence which is at least 60%, 62%, 65%, 67%, 70%, 72%, 75%, 77%, 80%, 82%, 85%, 87%, 90%, 92%, 95%, 97%, 98%, 99% identical to SEQ ID NO: 12;
wherein the heavy chain variable domain comprises a polypeptide sequence which is at least 60%, 62%, 65%, 67%, 70%, 72%, 75%, 77%, 80%, 82%, 85%, 87%, 90%, 92%, 95%, 97%, 98%, 99% identical to SEQ ID NO: 17 and the light chain variable domain comprises a polypeptide sequence which is at least 60%, 62%, 65%, 67%, 70%, 72%, 75%, 77%, 80%, 82%, 85%, 87%, 90%, 92%, 95%, 97%, 98%, 99% identical to SEQ ID NO: 18;
wherein the heavy chain variable domain comprises a polypeptide sequence which is at least 60%, 62%, 65%, 67%, 70%, 72%, 75%, 77%, 80%, 82%, 85%, 87%, 90%, 92%, 95%, 97%, 98%, 99% identical to SEQ ID NO: 19 and the light chain variable domain comprises a polypeptide sequence which is at least 60%, 62%, 65%, 67%, 70%, 72%, 75%, 77%, 80%, 82%, 85%, 87%, 90%, 92%, 95%, 97%, 98%, 99% identical to SEQ ID NO: 20;
wherein the heavy chain variable domain comprises a polypeptide sequence which is at least 60%, 62%, 65%, 67%, 70%, 72%, 75%, 77%, 80%, 82%, 85%, 87%, 90%, 92%, 95%, 97%, 98%, 99% identical to SEQ ID NO: 21 and the light chain variable domain comprises a polypeptide sequence which is at least 60%, 62%, 65%, 67%, 70%, 72%, 75%, 77%, 80%, 82%, 85%, 87%, 90%, 92%, 95%, 97%, 98%, 99% identical to SEQ ID NO: 22;
wherein the heavy chain variable domain comprises a polypeptide sequence which is at least 60%, 62%, 65%, 67%, 70%, 72%, 75%, 77%, 80%, 82%, 85%, 87%, 90%, 92%, 95%, 97%, 98%, 99% identical to SEQ ID NO: 25 and the light chain variable domain comprises a polypeptide sequence which is at least 60%, 62%, 65%, 67%, 70%, 72%, 75%, 77%, 80%, 82%, 85%, 87%, 90%, 92%, 95%, 97%, 98%, 99% identical to SEQ ID NO: 26;
wherein the heavy chain variable domain comprises a polypeptide sequence which is at least 60%, 62%, 65%, 67%, 70%, 72%, 75%, 77%, 80%, 82%, 85%, 87%, 90%, 92%, 95%, 97%, 98%, 99% identical to SEQ ID NO: 29 and the light chain variable domain comprises a polypeptide sequence which is at least 60%, 62%, 65%, 67%, 70%, 72%, 75%, 77%, 80%, 82%, 85%, 87%, 90%, 92%, 95%, 97%, 98%, 99% identical to SEQ ID NO: 30;
wherein the heavy chain variable domain comprises a polypeptide sequence which is at least 60%, 62%, 65%, 67%, 70%, 72%, 75%, 77%, 80%, 82%, 85%, 87%, 90%, 92%, 95%, 97%, 98%, 99% identical to SEQ ID NO: 31 and the light chain variable domain comprises a polypeptide sequence which is at least 60%, 62%, 65%, 67%, 70%, 72%, 75%, 77%, 80%, 82%, 85%, 87%, 90%, 92%, 95%, 97%, 98%, 99% identical to SEQ ID NO: 32;
wherein the heavy chain variable domain comprises a polypeptide sequence which is at least 60%, 62%, 65%, 67%, 70%, 72%, 75%, 77%, 80%, 82%, 85%, 87%, 90%, 92%, 95%, 97%, 98%, 99% identical to SEQ ID NO: 33 and the light chain variable domain comprises a polypeptide sequence which is at least 60%, 62%, 65%, 67%, 70%, 72%, 75%, 77%, 80%, 82%, 85%, 87%, 90%, 92%, 95%, 97%, 98%, 99% identical to SEQ ID NO: 34;
wherein the heavy chain variable domain comprises a polypeptide sequence which is at least 60%, 62%, 65%, 67%, 70%, 72%, 75%, 77%, 80%, 82%, 85%, 87%, 90%, 92%, 95%, 97%, 98%, 99% identical to SEQ ID NO: 37 and the light chain variable domain comprises a polypeptide sequence which is at least 60%, 62%, 65%, 67%, 70%, 72%, 75%, 77%, 80%, 82%, 85%, 87%, 90%, 92%, 95%, 97%, 98%, 99% identical to SEQ ID NO: 38;
wherein the heavy chain variable domain comprises a polypeptide sequence which is at least 60%, 62%, 65%, 67%, 70%, 72%, 75%, 77%, 80%, 82%, 85%, 87%, 90%, 92%, 95%, 97%, 98%, 99% identical to SEQ ID NO: 39 and the light chain variable domain comprises a polypeptide sequence which is at least 60%, 62%, 65%, 67%, 70%, 72%, 75%, 77%, 80%, 82%, 85%, 87%, 90%, 92%, 95%, 97%, 98%, 99% identical to SEQ ID NO: 40;
wherein the heavy chain variable domain comprises a polypeptide sequence which is at least 60%, 62%, 65%, 67%, 70%, 72%, 75%, 77%, 80%, 82%, 85%, 87%, 90%, 92%, 95%, 97%, 98%, 99% identical to SEQ ID NO: 43 and the light chain variable domain comprises a polypeptide sequence which is at least 60%, 62%, 65%, 67%, 70%, 72%, 75%, 77%, 80%, 82%, 85%, 87%, 90%, 92%, 95%, 97%, 98%, 99% identical to SEQ ID NO: 44; or
wherein the heavy chain variable domain comprises a polypeptide sequence which is at least 60%, 62%, 65%, 67%, 70%, 72%, 75%, 77%, 80%, 82%, 85%, 87%, 90%, 92%, 95%, 97%, 98%, 99% identical to SEQ ID NO: 45 and the light chain variable domain comprises a polypeptide sequence which is at least 60%, 62%, 65%, 67%, 70%, 72%, 75%, 77%, 80%, 82%, 85%, 87%, 90%, 92%, 95%, 97%, 98%, 99% identical to SEQ ID NO: 46.

9-22. (canceled)

23. The antibody of claim 1, wherein the heavy chain variable domain comprises SEQ ID NO: 3 and the light chain variable domain comprises SEQ ID NO:
wherein the heavy chain variable domain comprises SEQ ID NO: 7 and the light chain variable domain comprises SEQ ID NO: 8;
wherein the heavy chain variable domain comprises SEQ ID NO: 9 and the light chain variable domain comprises SEQ ID NO: 10;
wherein the heavy chain variable domain comprises SEQ ID NO: 11 and the light chain variable domain comprises SEQ ID NO: 12;
wherein the heavy chain variable domain comprises SEQ ID NO: 17 and the light chain variable domain comprises SEQ ID NO: 18;
wherein the heavy chain variable domain comprises SEQ ID NO: 19 and the light chain variable domain comprises SEQ ID NO: 20;
wherein the heavy chain variable domain comprises SEQ ID NO: 21 and the light chain variable domain comprises SEQ ID NO: 22;
wherein the heavy chain variable domain comprises SEQ ID NO: 25 and the light chain variable domain comprises SEQ ID NO: 26;
wherein the heavy chain variable domain comprises SEQ ID NO: 29 and the light chain variable domain comprises SEQ ID NO: 30;
wherein the heavy chain variable domain comprises SEQ ID NO: 31 and the light chain variable domain comprises SEQ ID NO: 32;
wherein the heavy chain variable domain comprises SEQ ID NO: 33 and the light chain variable domain comprises SEQ ID NO: 34;
wherein the heavy chain variable domain comprises SEQ ID NO: 37 and the light chain variable domain comprises SEQ ID NO: 38;
wherein the heavy chain variable domain comprises SEQ ID NO: 39 and the light chain variable domain comprises SEQ ID NO: 40;
wherein the heavy chain variable domain comprises SEQ ID NO: 43 and the light chain variable domain comprises SEQ ID NO: 44; or
wherein the heavy chain variable domain comprises SEQ ID NO: 45 and the light chain variable domain comprises SEQ ID NO: 46.

24-43. (canceled)

44. The antibody of claim 1, wherein the antibody neutralizes a coronavirus.

45. The antibody of claim 44, wherein the coronavirus is a SARS-CoV-2 wild type virus, SARS-CoV-2 WA1 variant, SARS-CoV-2 B.1.1.7 variant, SARS-CoV-2 B1.526 variant, SARS-CoV-2 B1.351 variant, SARS-CoV-2 P1 variant, SARS-CoV-2 B1.352 variant, or SARS-CoV-2 B.1.427 variant.

46-52. (canceled)

53. A method of treating or preventing a COVID-19 infection in a subject in need thereof, the method comprising administering to the subject a therapeutically effective amount of a synthesized monoclonal antibody, or a functional fragment thereof, comprising a heavy chain having a variable domain and a constant domain and a light chain having a variable domain and a constant domain, wherein the antibody binds an antigen on a coronavirus particle.

54-59. (canceled)

60. The method of claim 53, wherein the heavy chain variable domain comprises a polypeptide sequence which is at least 60%, 62%, 65%, 67%, 70%, 72%, 75%, 77%, 80%, 82%, 85%, 87%, 90%, 92%, 95%, 97%, 98%, 99% identical to SEQ ID NO: 3 and the light chain variable domain comprises a polypeptide sequence which is at least 60%, 62%, 65%, 67%, 70%, 72%, 75%, 77%, 80%, 82%, 85%, 87%, 90%, 92%, 95%, 97%, 98%, 99% identical to SEQ ID NO: 4;
wherein the heavy chain variable domain comprises a polypeptide sequence which is at least 60%, 62%, 65%, 67%, 70%, 72%, 75%, 77%, 80%, 82%, 85%, 87%, 90%, 92%, 95%, 97%, 98%, 99% identical to SEQ ID NO: 7 and the light chain variable domain comprises a polypeptide sequence which is at least 60%, 62%, 65%, 67%, 70%, 72%, 75%, 77%, 80%, 82%, 85%, 87%, 90%, 92%, 95%, 97%, 98%, 99% identical to SEQ ID NO: 8;
wherein the heavy chain variable domain comprises a polypeptide sequence which is at least 60%, 62%, 65%, 67%, 70%, 72%, 75%, 77%, 80%, 82%, 85%, 87%, 90%, 92%, 95%, 97%, 98%, 99% identical to SEQ ID NO: 9 and the light chain variable domain comprises a polypeptide sequence which is at least 60%, 62%, 65%, 67%, 70%, 72%, 75%, 77%, 80%, 82%, 85%, 87%, 90%, 92%, 95%, 97%, 98%, 99% identical to SEQ ID NO: 10;
wherein the heavy chain variable domain comprises a polypeptide sequence which is at least 60%, 62%, 65%, 67%, 70%, 72%, 75%, 77%, 80%, 82%, 85%, 87%, 90%, 92%, 95%, 97%, 98%, 99% identical to SEQ ID NO: 11 and the light chain variable domain comprises a polypeptide sequence which is at least 60%, 62%, 65%, 67%, 70%, 72%, 75%, 77%, 80%, 82%, 85%, 87%, 90%, 92%, 95%, 97%, 98%, 99% identical to SEQ ID NO: 12;
wherein the heavy chain variable domain comprises a polypeptide sequence which is at least 60%, 62%, 65%, 67%, 70%, 72%, 75%, 77%, 80%, 82%, 85%, 87%, 90%, 92%, 95%, 97%, 98%, 99% identical to SEQ ID NO: 17 and the light chain variable domain comprises a polypeptide sequence which is at least 60%, 62%, 65%, 67%, 70%, 72%, 75%, 77%, 80%, 82%, 85%, 87%, 90%, 92%, 95%, 97%, 98%, 99% identical to SEQ ID NO: 18;
wherein the heavy chain variable domain comprises a polypeptide sequence which is at least 60%, 62%, 65%, 67%, 70%, 72%, 75%, 77%, 80%, 82%, 85%, 87%, 90%, 92%, 95%, 97%, 98%, 99% identical to SEQ ID NO: 19 and the light chain variable domain comprises a polypeptide sequence which is at least 60%, 62%, 65%, 67%, 70%, 72%, 75%, 77%, 80%, 82%, 85%, 87%, 90%, 92%, 95%, 97%, 98%, 99% identical to SEQ ID NO: 20;
wherein the heavy chain variable domain comprises a polypeptide sequence which is at least 60%, 62%, 65%, 67%, 70%, 72%, 75%, 77%, 80%, 82%, 85%, 87%, 90%, 92%, 95%, 97%, 98%, 99% identical to SEQ ID NO: 21 and the light chain variable domain comprises a polypeptide sequence which is at least 60%, 62%, 65%, 67%, 70%, 72%, 75%, 77%, 80%, 82%, 85%, 87%, 90%, 92%, 95%, 97%, 98%, 99% identical to SEQ ID NO: 22;
wherein the heavy chain variable domain comprises a polypeptide sequence which is at least 60%, 62%, 65%, 67%, 70%, 72%, 75%, 77%, 80%, 82%, 85%, 87%, 90%, 92%, 95%, 97%, 98%, 99% identical to SEQ ID NO: 25 and the light chain variable domain comprises a polypeptide sequence which is at least 60%, 62%, 65%, 67%, 70%, 72%, 75%, 77%, 80%, 82%, 85%, 87%, 90%, 92%, 95%, 97%, 98%, 99% identical to SEQ ID NO: 26;
wherein the heavy chain variable domain comprises a polypeptide sequence which is at least 60%, 62%, 65%, 67%, 70%, 72%, 75%, 77%, 80%, 82%, 85%, 87%, 90%, 92%, 95%, 97%, 98%, 99% identical to SEQ ID NO: 29 and the light chain variable domain comprises a polypeptide sequence which is at least 60%, 62%, 65%, 67%, 70%, 72%, 75%, 77%, 80%, 82%, 85%, 87%, 90%, 92%, 95%, 97%, 98%, 99% identical to SEQ ID NO: 30;
wherein the heavy chain variable domain comprises a polypeptide sequence which is at least 60%, 62%, 65%, 67%, 70%, 72%, 75%, 77%, 80%, 82%, 85%, 87%, 90%, 92%, 95%, 97%, 98%, 99% identical to SEQ ID NO: 31 and the light chain variable domain comprises a polypeptide sequence which is at least 60%, 62%, 65%, 67%, 70%, 72%, 75%, 77%, 80%, 82%, 85%, 87%, 90%, 92%, 95%, 97%, 98%, 99% identical to SEQ ID NO: 32;
wherein the heavy chain variable domain comprises a polypeptide sequence which is at least 60%, 62%, 65%, 67%, 70%, 72%, 75%, 77%, 80%, 82%, 85%, 87%, 90%, 92%, 95%, 97%, 98%, 99% identical to SEQ ID NO: 33 and the light chain variable domain comprises a polypeptide sequence which is at least 60%, 62%, 65%, 67%, 70%, 72%, 75%, 77%, 80%, 82%, 85%, 87%, 90%, 92%, 95%, 97%, 98%, 99% identical to SEQ ID NO: 34;
wherein the heavy chain variable domain comprises a polypeptide sequence which is at least 60%, 62%, 65%, 67%, 70%, 72%, 75%, 77%, 80%, 82%, 85%, 87%, 90%, 92%, 95%, 97%, 98%, 99% identical to SEQ ID NO: 37 and the light chain variable domain comprises a polypeptide sequence which is at least 60%, 62%, 65%, 67%, 70%, 72%, 75%, 77%, 80%, 82%, 85%, 87%, 90%, 92%, 95%, 97%, 98%, 99% identical to SEQ ID NO: 38;
wherein the heavy chain variable domain comprises a polypeptide sequence which is at least 60%, 62%, 65%, 67%, 70%, 72%, 75%, 77%, 80%, 82%, 85%, 87%, 90%, 92%, 95%, 97%, 98%, 99% identical to SEQ ID NO: 39 and the light chain variable domain comprises a polypeptide sequence which is at least 60%, 62%, 65%, 67%, 70%, 72%, 75%, 77%, 80%, 82%, 85%, 87%, 90%, 92%, 95%, 97%, 98%, 99% identical to SEQ ID NO: 40;
wherein the heavy chain variable domain comprises a polypeptide sequence which is at least 60%, 62%, 65%, 67%, 70%, 72%, 75%, 77%, 80%, 82%, 85%, 87%, 90%, 92%, 95%, 97%, 98%, 99% identical to SEQ ID NO: 43 and the light chain variable domain comprises a polypeptide sequence which is at least 60%, 62%, 65%, 67%, 70%, 72%, 75%, 77%, 80%, 82%, 85%, 87%, 90%, 92%, 95%, 97%, 98%, 99% identical to SEQ ID NO: 44; or
wherein the heavy chain variable domain comprises a polypeptide sequence which is at least 60%, 62%, 65%, 67%, 70%, 72%, 75%, 77%, 80%, 82%, 85%, 87%, 90%, 92%, 95%, 97%, 98%, 99% identical to SEQ ID NO: 45 and the light chain variable domain comprises a polypeptide sequence which is at least 60%, 62%, 65%, 67%, 70%, 72%, 75%, 77%, 80%, 82%, 85%, 87%, 90%, 92%, 95%, 97%, 98%, 99% identical to SEQ ID NO: 46.

61-74. (canceled)

75. The method of claim 53, wherein the heavy chain variable domain comprises SEQ ID NO: 3 and the light chain variable domain comprises SEQ ID NO:
wherein the heavy chain variable domain comprises SEQ ID NO: 7 and the light chain variable domain comprises SEQ ID NO: 8;
wherein the heavy chain variable domain comprises SEQ ID NO: 9 and the light chain variable domain comprises SEQ ID NO: 10;
wherein the heavy chain variable domain comprises SEQ ID NO: 11 and the light chain variable domain comprises SEQ ID NO: 12;
wherein the heavy chain variable domain comprises SEQ ID NO: 17 and the light chain variable domain comprises SEQ ID NO: 18;
wherein the heavy chain variable domain comprises SEQ ID NO: 19 and the light chain variable domain comprises SEQ ID NO: 20;
wherein the heavy chain variable domain comprises SEQ ID NO: 21 and the light chain variable domain comprises SEQ ID NO: 22;
wherein the heavy chain variable domain comprises SEQ ID NO: 25 and the light chain variable domain comprises SEQ ID NO: 26;
wherein the heavy chain variable domain comprises SEQ ID NO: 29 and the light chain variable domain comprises SEQ ID NO: 30;
wherein the heavy chain variable domain comprises SEQ ID NO: 31 and the light chain variable domain comprises SEQ ID NO: 32;
wherein the heavy chain variable domain comprises SEQ ID NO: 33 and the light chain variable domain comprises SEQ ID NO: 34;
wherein the heavy chain variable domain comprises SEQ ID NO: 37 and the light chain variable domain comprises SEQ ID NO: 38;
wherein the heavy chain variable domain comprises SEQ ID NO: 39 and the light chain variable domain comprises SEQ ID NO: 40;
wherein the heavy chain variable domain comprises SEQ ID NO: 43 and the light chain variable domain comprises SEQ ID NO: 44; or
wherein the heavy chain variable domain comprises SEQ ID NO: 45 and the light chain variable domain comprises SEQ ID NO: 46.

76-95. (canceled)

96. The method of claim 53, wherein the antibody neutralizes a coronavirus.

97. The method of claim 96, wherein the coronavirus is a SARS-CoV-2 wild type virus, SARS-CoV-2 WA1 variant, SARS-CoV-2 B.1.1.7 variant, SARS-CoV-2 B1.526 variant, SARS-CoV-2 B1.351 variant, SARS-CoV-2 P1 variant, SARS-CoV-2 B1.352 variant, or SARS-CoV-2 B.1.427 variant.

98-105. (canceled)

106. A bispecific molecule comprising a first polypeptide chain and a second polypeptide chain, wherein:
the first polypeptide chain comprises:
a first light chain comprising a variable domain and a constant domain;
a first heavy chain comprising a variable domain and a constant domain;
the second polypeptide chain comprises:
a second light chain comprising a variable domain and a constant domain; and
a second heavy chain comprising a variable domain and a constant domain.

107. The molecule of claim 106, wherein the first polypeptide chain and the second polypeptide chain are covalently bonded to one another.

108-119. (canceled)

120. The molecule of claim 106, wherein the molecule comprises a polypeptide sequence which is at least 60% identical to SEQ ID NO: 51, a polypeptide sequence which is at least 60% identical to SEQ ID NO: 52, a polypeptide sequence which is at least 60% identical to SEQ ID NO: 53, and a polypeptide sequence which is at least 60% identical to SEQ ID NO: 54;
wherein the molecule comprises a polypeptide sequence which is at least 60% identical to SEQ ID NO: 55, a polypeptide sequence which is at least 60% identical to SEQ ID NO: 56, a polypeptide sequence which is at least 60% identical to SEQ ID NO: 57, and a polypeptide sequence which is at least 60% identical to SEQ ID NO: 58;
wherein the molecule comprises a polypeptide sequence which is at least 60% identical to SEQ ID NO: 67, a polypeptide sequence which is at least 60% identical to SEQ ID NO: 68, a polypeptide sequence which is at least 60% identical to SEQ ID NO: 69, and a polypeptide sequence which is at least 60% identical to SEQ ID NO: 70;
wherein the molecule comprises a polypeptide sequence which is at least 60% identical to SEQ ID NO: 71, a polypeptide sequence which is at least 60% identical to SEQ ID NO: 72, a polypeptide sequence which is at least 60% identical to SEQ ID NO: 73, and a polypeptide sequence which is at least 60% identical to SEQ ID NO: 74;
wherein the molecule comprises a polypeptide sequence which is at least 60% identical to SEQ ID NO: 75, a polypeptide sequence which is at least 60% identical to SEQ ID NO: 76, a polypeptide sequence which is at least 60% identical to SEQ ID NO: 77, and a polypeptide sequence which is at least 60% identical to SEQ ID NO: 78;
wherein the molecule comprises a polypeptide sequence which is at least 60% identical to SEQ ID NO: 79, a polypeptide sequence which is at least 60% identical to SEQ ID NO: 80, a polypeptide sequence which is at least 60% identical to SEQ ID NO: 81, a polypeptide sequence which is at least 60% identical to and SEQ ID NO: 82;
wherein the molecule comprises a polypeptide sequence which is at least 60% identical to SEQ ID NO: 83, a polypeptide sequence which is at least 60% identical to SEQ ID NO: 84, a polypeptide sequence which is at least 60% identical to SEQ ID NO: 85, and a polypeptide sequence which is at least 60% identical to SEQ ID NO: 86;
wherein the molecule comprises a polypeptide sequence which is at least 60% identical to SEQ ID NO: 87, a polypeptide sequence which is at least 60% identical to SEQ ID NO: 88, a polypeptide sequence which is at least 60% identical to SEQ ID NO: 89, and a polypeptide sequence which is at least 60% identical to SEQ ID NO: 90;
wherein the molecule comprises a polypeptide sequence which is at least 60% identical to SEQ ID NO: 91, a polypeptide sequence which is at least 60% identical to SEQ ID NO: 92, a polypeptide sequence which is at least 60% identical to SEQ ID NO: 93, and a polypeptide sequence which is at least 60% identical to SEQ ID NO: 94;
wherein the molecule comprises a polypeptide sequence which is at least 60% identical to SEQ ID NO: 95, a polypeptide sequence which is at least 60% identical to SEQ ID NO: 96, a polypeptide sequence which is at least 60% identical to SEQ ID NO: 97, and a polypeptide sequence which is at least 60% identical to SEQ ID NO: 98;
wherein the molecule comprises a polypeptide sequence which is at least 60% identical to SEQ ID NO: 99, a polypeptide sequence which is at least 60% identical to SEQ ID NO: 100, a polypeptide sequence which is at least 60% identical to SEQ ID NO: 101, and a polypeptide sequence which is at least 60% identical to SEQ ID NO: 102;
wherein the molecule comprises a polypeptide sequence which is at least 60% identical to SEQ ID NO: 103, a polypeptide sequence which is at least 60% identical to SEQ ID NO: 104, a polypeptide sequence which is at least 60% identical to SEQ ID NO: 105, and a polypeptide sequence which is at least 60% identical to SEQ ID NO: 106;
wherein the molecule comprises a polypeptide sequence which is at least 60% identical to SEQ ID NO: 107, a polypeptide sequence which is at least 60% identical to SEQ ID NO: 108, a polypeptide sequence which is at least 60% identical to SEQ ID NO: 109, and a polypeptide sequence which is at least 60% identical to SEQ ID NO: 110;
wherein the molecule comprises a polypeptide sequence which is at least 60% identical to SEQ ID NO: 115, a polypeptide sequence which is at least 60% identical to SEQ ID NO: 116, a polypeptide sequence which is at least 60% identical to SEQ ID NO: 117, and a polypeptide sequence which is at least 60% identical to SEQ ID NO: 118;
wherein the molecule comprises a polypeptide sequence which is at least 60% identical to SEQ ID NO: 119, a polypeptide sequence which is at least 60% identical to SEQ ID NO: 120, a polypeptide sequence which is at least 60% identical to SEQ ID NO: 121, and a polypeptide sequence which is at least 60% identical to SEQ ID NO: 122;
wherein the molecule comprises a polypeptide sequence which is at least 60% identical to SEQ ID NO: 123, a polypeptide sequence which is at least 60% identical to SEQ ID NO: 124, a polypeptide sequence which is at least 60% identical to SEQ ID NO: 125, and a polypeptide sequence which is at least 60% identical to SEQ ID NO: 126;
wherein the molecule comprises a polypeptide sequence which is at least 60% identical to SEQ ID NO: 127, a polypeptide sequence which is at least 60% identical to SEQ ID NO: 128, a polypeptide sequence which is at least 60% identical to SEQ ID NO: 129, and a polypeptide sequence which is at least 60% identical to SEQ ID NO: 130;
wherein the molecule comprises a polypeptide sequence which is at least 60% identical to SEQ ID NO: 131, a polypeptide sequence which is at least 60% identical to SEQ ID NO: 132, a polypeptide sequence which is at least 60% identical to SEQ ID NO: 133, and a polypeptide sequence which is at least 60% identical to SEQ ID NO: 133;
wherein the molecule comprises a polypeptide sequence which is at least 60% identical to SEQ ID NO: 139, a polypeptide sequence which is at least 60% identical to SEQ ID NO: 140, a polypeptide sequence which is at least 60% identical to SEQ ID NO: 141, and a polypeptide sequence which is at least 60% identical to SEQ ID NO: 142;
wherein the molecule comprises a polypeptide sequence which is at least 60% identical to SEQ ID NO: 143, a polypeptide sequence which is at least 60% identical to SEQ ID NO: 144, a polypeptide sequence which is at least 60% identical to SEQ ID NO: 145, and a polypeptide sequence which is at least 60% identical to SEQ ID NO: 146;
wherein the molecule comprises a polypeptide sequence which is at least 60% identical to SEQ ID NO: 147, a polypeptide sequence which is at least 60% identical to SEQ ID NO: 148, a polypeptide sequence which is at least 60% identical to SEQ ID NO: 149, and a polypeptide sequence which is at least 60% identical to SEQ ID NO: 150;
wherein the molecule comprises a polypeptide sequence which is at least 60% identical to SEQ ID NO: 151, a polypeptide sequence which is at least 60% identical to SEQ ID NO: 152, a polypeptide sequence which is at least 60% identical to SEQ ID NO: 153, and a polypeptide sequence which is at least 60% identical to SEQ ID NO: 154;
wherein the molecule comprises a polypeptide sequence which is at least 60% identical to SEQ ID NO: 155, a polypeptide sequence which is at least 60% identical to SEQ ID NO: 156, a polypeptide sequence which is at least 60% identical to SEQ ID NO: 157, and a polypeptide sequence which is at least 60% identical to SEQ ID NO: 158;
wherein the molecule comprises a polypeptide sequence which is at least 60% identical to SEQ ID NO: 159, a polypeptide sequence which is at least 60% identical to SEQ ID NO: 160, a polypeptide sequence which is at least 60% identical to SEQ ID NO: 161, and a polypeptide sequence which is at least 60% identical to SEQ ID NO: 162;
wherein the molecule comprises a polypeptide sequence which is at least 60% identical to SEQ ID NO: 163, a polypeptide sequence which is at least 60% identical to SEQ ID NO: 164, a polypeptide sequence which is at least 60% identical to SEQ ID NO: 165, and a polypeptide sequence which is at least 60% identical to SEQ ID NO: 166;
wherein the molecule comprises a polypeptide sequence which is at least 60% identical to SEQ ID NO: 167, a polypeptide sequence which is at least 60% identical to SEQ ID NO: 168, a polypeptide sequence which is at least 60% identical to SEQ ID NO: 169, and a polypeptide sequence which is at least 60% identical to SEQ ID NO: 170;
wherein the molecule comprises a polypeptide sequence which is at least 60% identical to SEQ ID NO: 171, a polypeptide sequence which is at least 60% identical to SEQ ID NO: 172, a polypeptide sequence which is at least 60% identical to SEQ ID NO: 173, and a polypeptide sequence which is at least 60% identical to SEQ ID NO: 174;
wherein the molecule comprises a polypeptide sequence which is at least 60% identical to SEQ ID NO: 175, a polypeptide sequence which is at least 60% identical to SEQ ID NO: 176, a polypeptide sequence which is at least 60% identical to SEQ ID NO: 177, and a polypeptide sequence which is at least 60% identical to SEQ ID NO: 178;
wherein the molecule comprises a polypeptide sequence which is at least 60% identical to SEQ ID NO: 179, a polypeptide sequence which is at least 60% identical to SEQ ID NO: 180, a polypeptide sequence which is at least 60% identical to SEQ ID NO: 181, and a polypeptide sequence which is at least 60% identical to SEQ ID NO: 182; or
wherein the molecule comprises a polypeptide sequence which is at least 60% identical to SEQ ID NO: 183, a polypeptide sequence which is at least 60% identical to SEQ ID NO: 184, a polypeptide sequence which is at least 60% identical to SEQ ID NO: 185, and a polypeptide sequence which is at least 60% identical to SEQ ID NO: 186.

121. The molecule of claim 106, wherein the molecule comprises SEQ ID NO: 55, SEQ ID NO: 56, SEQ ID NO: 57, and SEQ ID NO: 58;
wherein the molecule comprises SEQ ID NO: 67, SEQ ID NO: 68, SEQ ID NO: 69, and SEQ ID NO: 70;
wherein the molecule comprises SEQ ID NO: 71, SEQ ID NO: 72, SEQ ID NO: 73, and SEQ ID NO: 74;
wherein the molecule comprises SEQ ID NO: 75, SEQ ID NO: 76, SEQ ID NO: 77, and SEQ ID NO: 78;
wherein the molecule comprises SEQ ID NO: 79, SEQ ID NO: 80, SEQ ID NO: 81, and SEQ ID NO: 82;
wherein the molecule comprises SEQ ID NO: 83, SEQ ID NO: 84, SEQ ID NO: 85, and SEQ ID NO: 86;
wherein the molecule comprises SEQ ID NO: 87, SEQ ID NO: 88, SEQ ID NO: 89, and SEQ ID NO: 90;
wherein the molecule comprises SEQ ID NO: 91, SEQ ID NO: 92, SEQ ID NO: 93, and SEQ ID NO: 94;
wherein the molecule comprises SEQ ID NO: 95, SEQ ID NO: 96, SEQ ID NO: 97, and SEQ ID NO: 98;
wherein the molecule comprises SEQ ID NO: 99, SEQ ID NO: 100, SEQ ID NO: 101, and SEQ ID NO: 102;
wherein the molecule comprises SEQ ID NO: 103, SEQ ID NO: 104, SEQ ID NO: 105, and SEQ ID NO: 106;
wherein the molecule comprises SEQ ID NO: 107, SEQ ID NO: 108, SEQ ID NO: 109, and SEQ ID NO: 110;
wherein the molecule comprises SEQ ID NO: 115, SEQ ID NO: 116, SEQ ID NO: 117, and SEQ ID NO: 118;
wherein the molecule comprises SEQ ID NO: 119, SEQ ID NO: 120, SEQ ID NO: 121, and SEQ ID NO: 122;
wherein the molecule comprises SEQ ID NO: 123, SEQ ID NO: 124, SEQ ID NO: 125, and SEQ ID NO: 126;
wherein the molecule comprises SEQ ID NO: 127, SEQ ID NO: 128, SEQ ID NO: 129, and SEQ ID NO: 130;
wherein the molecule comprises SEQ ID NO: 131, SEQ ID NO: 132, SEQ ID NO: 133, and SEQ ID NO: 133;
wherein the molecule comprises SEQ ID NO: 139, SEQ ID NO: 140, SEQ ID NO: 141, and SEQ ID NO: 142;
wherein the molecule comprises SEQ ID NO: 143, SEQ ID NO: 144, SEQ ID NO: 145, and SEQ ID NO: 146;
wherein the molecule comprises SEQ ID NO: 147, SEQ ID NO: 148, SEQ ID NO: 149, and SEQ ID NO: 150;
wherein the molecule comprises SEQ ID NO: 151, SEQ ID NO: 152, SEQ ID NO: 153, and SEQ ID NO: 154;
wherein the molecule comprises SEQ ID NO: 155, SEQ ID NO: 156, SEQ ID NO: 157, and SEQ ID NO: 158;
wherein the molecule comprises SEQ ID NO: 159, SEQ ID NO: 160, SEQ ID NO: 161, and SEQ ID NO: 162;
wherein the molecule comprises SEQ ID NO: 163, SEQ ID NO: 164, SEQ ID NO: 165, and SEQ ID NO: 166;
wherein the molecule comprises SEQ ID NO: 167, SEQ ID NO: 168, SEQ ID NO: 169, and SEQ ID NO: 170;
wherein the molecule comprises SEQ ID NO: 171, SEQ ID NO: 172, SEQ ID NO: 173, and SEQ ID NO: 174;
wherein the molecule comprises SEQ ID NO: 175, SEQ ID NO: 176, SEQ ID NO: 177, and SEQ ID NO: 178;
wherein the molecule comprises SEQ ID NO: 179, SEQ ID NO: 180, SEQ ID NO: 181, and SEQ ID NO: 182; or
wherein the molecule comprises SEQ ID NO: 183, SEQ ID NO: 184, SEQ ID NO: 185, and SEQ ID NO: 186.

122-149. (canceled)

150. The molecule of claim 106, wherein the molecule further comprises one or more disulfide bonds.

151. The molecule of claim 106, wherein the molecule further comprises one or more linker sequences.

152. The molecule of claim 106, wherein the molecule is capable of neutralizing a coronavirus.

153. The molecule of claim 152, wherein the coronavirus is a SARS-CoV-2 wild type virus, SARS-CoV-2 WA1 variant, SARS-CoV-2 B.1.1.7 variant, SARS-CoV-2 B1.526 variant, SARS-CoV-2 B1.351 variant, SARS-CoV-2 P1 variant, SARS-CoV-2 B1.352 variant, or SARS-CoV-2 B.1.427 variant.

154-157. (canceled)

158. A method of treating or preventing a COVID-19 infection in a subject in need thereof, the method comprising administering to the subject a composition comprising a bispecific molecule comprising a first polypeptide chain and a second polypeptide chain, wherein:
the first polypeptide chain comprises:
a first light chain comprising a variable domain and a constant domain;
a first heavy chain comprising a variable domain and a constant domain;
the second polypeptide chain comprises:
a second light chain comprising a variable domain and a constant domain; and
a second heavy chain comprising a variable domain and a constant domain.

159. The method of claim 158, wherein the first polypeptide chain and the second polypeptide chain are covalently bonded to one another.

160-171. (canceled)

172. The method of claim 158, wherein the molecule comprises a polypeptide sequence which is at least 60% identical to SEQ ID NO: 51, a polypeptide sequence which is at least 60% identical to SEQ ID NO: 52, a polypeptide sequence which is at least 60% identical to SEQ ID NO: 53, and a polypeptide sequence which is at least 60% identical to SEQ ID NO: 54;
wherein the molecule comprises a polypeptide sequence which is at least 60% identical to SEQ ID NO: 55, a polypeptide sequence which is at least 60% identical to SEQ ID NO: 56, a polypeptide sequence which is at least 60% identical to SEQ ID NO: 57, and a polypeptide sequence which is at least 60% identical to SEQ ID NO: 58;
wherein the molecule comprises a polypeptide sequence which is at least 60% identical to SEQ ID NO: 67, a polypeptide sequence which is at least 60% identical to SEQ ID NO: 68, a polypeptide sequence which is at least 60% identical to SEQ ID NO: 69, and a polypeptide sequence which is at least 60% identical to SEQ ID NO: 70;
wherein the molecule comprises a polypeptide sequence which is at least 60% identical to SEQ ID NO: 71, a polypeptide sequence which is at least 60% identical to SEQ ID NO: 72, a polypeptide sequence which is at least 60% identical to SEQ ID NO: 73, and a polypeptide sequence which is at least 60% identical to SEQ ID NO: 74;
wherein the molecule comprises a polypeptide sequence which is at least 60% identical to SEQ ID NO: 75, a polypeptide sequence which is at least 60% identical to SEQ ID NO: 76, a polypeptide sequence which is at least 60% identical to SEQ ID NO: 77, and a polypeptide sequence which is at least 60% identical to SEQ ID NO: 78;
wherein the molecule comprises a polypeptide sequence which is at least 60% identical to SEQ ID NO: 79, a polypeptide sequence which is at least 60% identical to SEQ ID NO: 80, a polypeptide sequence which is at least 60% identical to SEQ ID NO: 81, a polypeptide sequence which is at least 60% identical to and SEQ ID NO: 82;
wherein the molecule comprises a polypeptide sequence which is at least 60% identical to SEQ ID NO: 83, a polypeptide sequence which is at least 60% identical to SEQ ID NO: 84, a polypeptide sequence which is at least 60% identical to SEQ ID NO: 85, and a polypeptide sequence which is at least 60% identical to SEQ ID NO: 86;
wherein the molecule comprises a polypeptide sequence which is at least 60% identical to SEQ ID NO: 87, a polypeptide sequence which is at least 60% identical to SEQ ID NO: 88, a polypeptide sequence which is at least 60% identical to SEQ ID NO: 89, and a polypeptide sequence which is at least 60% identical to SEQ ID NO: 90;
wherein the molecule comprises a polypeptide sequence which is at least 60% identical to SEQ ID NO: 91, a polypeptide sequence which is at least 60% identical to SEQ ID NO: 92, a polypeptide sequence which is at least 60% identical to SEQ ID NO: 93, and a polypeptide sequence which is at least 60% identical to SEQ ID NO: 94;
wherein the molecule comprises a polypeptide sequence which is at least 60% identical to SEQ ID NO: 95, a polypeptide sequence which is at least 60% identical to SEQ ID NO: 96, a polypeptide sequence which is at least 60% identical to SEQ ID NO: 97, and a polypeptide sequence which is at least 60% identical to SEQ ID NO: 98;
wherein the molecule comprises a polypeptide sequence which is at least 60% identical to SEQ ID NO: 99, a polypeptide sequence which is at least 60% identical to SEQ ID NO: 100, a polypeptide sequence which is at least 60% identical to SEQ ID NO: 101, and a polypeptide sequence which is at least 60% identical to SEQ ID NO: 102;
wherein the molecule comprises a polypeptide sequence which is at least 60% identical to SEQ ID NO: 103, a polypeptide sequence which is at least 60% identical to SEQ ID NO: 104, a polypeptide sequence which is at least 60% identical to SEQ ID NO: 105, and a polypeptide sequence which is at least 60% identical to SEQ ID NO: 106;
wherein the molecule comprises a polypeptide sequence which is at least 60% identical to SEQ ID NO: 107, a polypeptide sequence which is at least 60% identical to SEQ ID NO: 108, a polypeptide sequence which is at least 60% identical to SEQ ID NO: 109, and a polypeptide sequence which is at least 60% identical to SEQ ID NO: 110;
wherein the molecule comprises a polypeptide sequence which is at least 60% identical to SEQ ID NO: 115, a polypeptide sequence which is at least 60% identical to SEQ ID NO: 116, a polypeptide sequence which is at least 60% identical to SEQ ID NO: 117, and a polypeptide sequence which is at least 60% identical to SEQ ID NO: 118;
wherein the molecule comprises a polypeptide sequence which is at least 60% identical to SEQ ID NO: 119, a polypeptide sequence which is at least 60% identical to SEQ ID NO: 120, a polypeptide sequence which is at least 60% identical to SEQ ID NO: 121, and a polypeptide sequence which is at least 60% identical to SEQ ID NO: 122;
wherein the molecule comprises a polypeptide sequence which is at least 60% identical to SEQ ID NO: 123, a polypeptide sequence which is at least 60% identical to SEQ ID NO: 124, a polypeptide sequence which is at least 60% identical to SEQ ID NO: 125, and a polypeptide sequence which is at least 60% identical to SEQ ID NO: 126;
wherein the molecule comprises a polypeptide sequence which is at least 60% identical to SEQ ID NO: 127, a polypeptide sequence which is at least 60% identical to SEQ ID NO: 128, a polypeptide sequence which is at least 60% identical to SEQ ID NO: 129, and a polypeptide sequence which is at least 60% identical to SEQ ID NO: 130;
wherein the molecule comprises a polypeptide sequence which is at least 60% identical to SEQ ID NO: 131, a polypeptide sequence which is at least 60% identical to SEQ ID NO: 132, a polypeptide sequence which is at least 60% identical to SEQ ID NO: 133, and a polypeptide sequence which is at least 60% identical to SEQ ID NO: 133;
wherein the molecule comprises a polypeptide sequence which is at least 60% identical to SEQ ID NO: 139, a polypeptide sequence which is at least 60% identical to SEQ ID NO: 140, a polypeptide sequence which is at least 60% identical to SEQ ID NO: 141, and a polypeptide sequence which is at least 60% identical to SEQ ID NO: 142;
wherein the molecule comprises a polypeptide sequence which is at least 60% identical to SEQ ID NO: 143, a polypeptide sequence which is at least 60% identical to SEQ ID NO: 144, a polypeptide sequence which is at least 60% identical to SEQ ID NO: 145, and a polypeptide sequence which is at least 60% identical to SEQ ID NO: 146;
wherein the molecule comprises a polypeptide sequence which is at least 60% identical to SEQ ID NO: 147, a polypeptide sequence which is at least 60% identical to SEQ ID NO: 148, a polypeptide sequence which is at least 60% identical to SEQ ID NO: 149, and a polypeptide sequence which is at least 60% identical to SEQ ID NO: 150;
wherein the molecule comprises a polypeptide sequence which is at least 60% identical to SEQ ID NO: 151, a polypeptide sequence which is at least 60% identical to SEQ ID NO: 152, a polypeptide sequence which is at least 60% identical to SEQ ID NO: 153, and a polypeptide sequence which is at least 60% identical to SEQ ID NO: 154;
wherein the molecule comprises a polypeptide sequence which is at least 60% identical to SEQ ID NO: 155, a polypeptide sequence which is at least 60% identical to SEQ ID NO: 156, a polypeptide sequence which is at least 60% identical to SEQ ID NO: 157, and a polypeptide sequence which is at least 60% identical to SEQ ID NO: 158;
wherein the molecule comprises a polypeptide sequence which is at least 60% identical to SEQ ID NO: 159, a polypeptide sequence which is at least 60% identical to SEQ ID NO: 160, a polypeptide sequence which is at least 60% identical to SEQ ID NO: 161, and a polypeptide sequence which is at least 60% identical to SEQ ID NO: 162;
wherein the molecule comprises a polypeptide sequence which is at least 60% identical to SEQ ID NO: 163, a polypeptide sequence which is at least 60% identical to SEQ ID NO: 164, a polypeptide sequence which is at least 60% identical to SEQ ID NO: 165, and a polypeptide sequence which is at least 60% identical to SEQ ID NO: 166;
wherein the molecule comprises a polypeptide sequence which is at least 60% identical to SEQ ID NO: 167, a polypeptide sequence which is at least 60% identical to SEQ ID NO: 168, a polypeptide sequence which is at least 60% identical to SEQ ID NO: 169, and a polypeptide sequence which is at least 60% identical to SEQ ID NO: 170;
wherein the molecule comprises a polypeptide sequence which is at least 60% identical to SEQ ID NO: 171, a polypeptide sequence which is at least 60% identical to SEQ ID NO: 172, a polypeptide sequence which is at least 60% identical to SEQ ID NO: 173, and a polypeptide sequence which is at least 60% identical to SEQ ID NO: 174;
wherein the molecule comprises a polypeptide sequence which is at least 60% identical to SEQ ID NO: 175, a polypeptide sequence which is at least 60% identical to SEQ ID NO: 176, a polypeptide sequence which is at least 60% identical to SEQ ID NO: 177, and a polypeptide sequence which is at least 60% identical to SEQ ID NO: 178;
wherein the molecule comprises a polypeptide sequence which is at least 60% identical to SEQ ID NO: 179, a polypeptide sequence which is at least 60% identical to SEQ ID NO: 180, a polypeptide sequence which is at least 60% identical to SEQ ID NO: 181, and a polypeptide sequence which is at least 60% identical to SEQ ID NO: 182; or
wherein the molecule comprises a polypeptide sequence which is at least 60% identical to SEQ ID NO: 183, a polypeptide sequence which is at least 60% identical to SEQ ID NO: 184, a polypeptide sequence which is at least 60% identical to SEQ ID NO: 185, and a polypeptide sequence which is at least 60% identical to SEQ ID NO: 186.

173. The method of claim 158, wherein the molecule comprises SEQ ID NO: 55, SEQ ID NO: 56, SEQ ID NO: 57, and SEQ ID NO: 58;
wherein the molecule comprises SEQ ID NO: 67, SEQ ID NO: 68, SEQ ID NO: 69, and SEQ ID NO: 70;
wherein the molecule comprises SEQ ID NO: 71, SEQ ID NO: 72, SEQ ID NO: 73, and SEQ ID NO: 74;
wherein the molecule comprises SEQ ID NO: 75, SEQ ID NO: 76, SEQ ID NO: 77, and SEQ ID NO: 78;
wherein the molecule comprises SEQ ID NO: 79, SEQ ID NO: 80, SEQ ID NO: 81, and SEQ ID NO: 82;
wherein the molecule comprises SEQ ID NO: 83, SEQ ID NO: 84, SEQ ID NO: 85, and SEQ ID NO: 86;
wherein the molecule comprises SEQ ID NO: 87, SEQ ID NO: 88, SEQ ID NO: 89, and SEQ ID NO: 90;
wherein the molecule comprises SEQ ID NO: 91, SEQ ID NO: 92, SEQ ID NO: 93, and SEQ ID NO: 94;
wherein the molecule comprises SEQ ID NO: 95, SEQ ID NO: 96, SEQ ID NO: 97, and SEQ ID NO: 98;
wherein the molecule comprises SEQ ID NO: 99, SEQ ID NO: 100, SEQ ID NO: 101, and SEQ ID NO: 102;
wherein the molecule comprises SEQ ID NO: 103, SEQ ID NO: 104, SEQ ID NO: 105, and SEQ ID NO: 106;
wherein the molecule comprises SEQ ID NO: 107, SEQ ID NO: 108, SEQ ID NO: 109, and SEQ ID NO: 110;
wherein the molecule comprises SEQ ID NO: 115, SEQ ID NO: 116, SEQ ID NO: 117, and SEQ ID NO: 118;
wherein the molecule comprises SEQ ID NO: 119, SEQ ID NO: 120, SEQ ID NO: 121, and SEQ ID NO: 122;
wherein the molecule comprises SEQ ID NO: 123, SEQ ID NO: 124, SEQ ID NO: 125, and SEQ ID NO: 126;
wherein the molecule comprises SEQ ID NO: 127, SEQ ID NO: 128, SEQ ID NO: 129, and SEQ ID NO: 130;
wherein the molecule comprises SEQ ID NO: 131, SEQ ID NO: 132, SEQ ID NO: 133, and SEQ ID NO: 133;
wherein the molecule comprises SEQ ID NO: 139, SEQ ID NO: 140, SEQ ID NO: 141, and SEQ ID NO: 142;
wherein the molecule comprises SEQ ID NO: 143, SEQ ID NO: 144, SEQ ID NO: 145, and SEQ ID NO: 146;
wherein the molecule comprises SEQ ID NO: 147, SEQ ID NO: 148, SEQ ID NO: 149, and SEQ ID NO: 150;
wherein the molecule comprises SEQ ID NO: 151, SEQ ID NO: 152, SEQ ID NO: 153, and SEQ ID NO: 154;
wherein the molecule comprises SEQ ID NO: 155, SEQ ID NO: 156, SEQ ID NO: 157, and SEQ ID NO: 158;
wherein the molecule comprises SEQ ID NO: 159, SEQ ID NO: 160, SEQ ID NO: 161, and SEQ ID NO: 162;
wherein the molecule comprises SEQ ID NO: 163, SEQ ID NO: 164, SEQ ID NO: 165, and SEQ ID NO: 166;
wherein the molecule comprises SEQ ID NO: 167, SEQ ID NO: 168, SEQ ID NO: 169, and SEQ ID NO: 170;
wherein the molecule comprises SEQ ID NO: 171, SEQ ID NO: 172, SEQ ID NO: 173, and SEQ ID NO: 174;
wherein the molecule comprises SEQ ID NO: 175, SEQ ID NO: 176, SEQ ID NO: 177, and SEQ ID NO: 178;
wherein the molecule comprises SEQ ID NO: 179, SEQ ID NO: 180, SEQ ID NO: 181, and SEQ ID NO: 182; or
wherein the molecule comprises SEQ ID NO: 183, SEQ ID NO: 184, SEQ ID NO: 185, and SEQ ID NO: 186.

174-201. (canceled)

202. The method of claim 158, wherein the molecule further comprises one or more disulfide bonds.

203. The method of claim 158, wherein the molecule further comprises one or more linker sequences.

204. The method of claim 158, wherein the molecule is capable of neutralizing a coronavirus.

205. The method of claim 204, wherein the coronavirus is a SARS-CoV-2 wild type virus, SARS-CoV-2 WA1 variant, SARS-CoV-2 B.1.1.7 variant, SARS-CoV-2 B1.526 variant, SARS-CoV-2 B1.351 variant, SARS-CoV-2 P1 variant, SARS-CoV-2 B1.352 variant, or SARS-CoV-2 B.1.427 variant.

206-210. (canceled)
